(19) United States
(12) Patent Application Publication
(10) Pub. No.: US 2025/0066792 A1
(43) Pub. Date: Feb. 27, 2025

(54) COMPOUNDS AND METHODS FOR MODULATION OF DYSTROPHIA MYOTONICA-PROTEIN KINASE (DMPK) EXPRESSION

(71) Applicant: Ionis Pharmaceuticals, Inc., Carlsbad, CA (US)

(72) Inventors: Eric E. Swayze, Encinitas, CA (US); Susan M. Freier, San Diego, CA (US)

(73) Assignee: Ionis Pharmaceuticals, Inc., Carlsbad, CA (US)

(21) Appl. No.: 18/627,154

(22) Filed: Apr. 4, 2024

Related U.S. Application Data
(63) Continuation of application No. 17/173,139, filed on Feb. 10, 2021, now Pat. No. 11,981,897.
Application No. 17/173,139 is a continuation of application No. 16/167,783, filed on Oct. 23, 2018, now Pat. No. 10,954,519.
Application No. 16/167,783 is a continuation of application No. 14/911,248, filed on Feb. 9, 2016, now abandoned.
(60) Provisional application No. 61/889,337, filed on Oct. 10, 2013.
(60) Provisional application No. 61/864,439, filed on Aug. 9, 2013.

(51) Int. Cl. C12N 15/113

(52) U.S. Cl. CPC C12N 15/1137; C12Y 207/11001; C12N 2310/11; C12N 2310/315; C12N 2310/32; C12N 2310/3231; C12N 2310/3341; C12N 2320/30

(57) ABSTRACT

Provided herein are methods, compounds, and compositions for reducing expression of a DMPK mRNA and protein in an animal. Also provided herein are methods, compounds, and compositions for preferentially reducing CUGexp DMPK RNA, reducing myotonia or reducing spliceopathy in an animal. Such methods, compounds, and compositions are useful to treat, prevent, delay, or ameliorate type 1 myotonic dystrophy, or a symptom thereof.

### SEQUENCE LISTING

[0001] The present application is being filed along with a Sequence Listing in electronic format. The Sequence Listing is provided as a file entitled BIOL0171SEQ.xml created Sep. 1, 2023, which is approximately 5268 Kb in size. The information in the electronic format of the sequence listing is incorporated herein by reference in its entirety.

### FIELD

[0002] Provided herein are methods, compounds, and compositions for reducing expression of DMPK mRNA and protein in an animal. Also, provided herein are methods, compounds, and compositions comprising a DMPK inhibitor for preferentially reducing CUGexp DMPK RNA, reducing myotonia, or reducing spliceopathy in an animal. Such methods, compounds, and compositions are useful, for example, to treat, prevent, or ameliorate type 1 myotonic dystrophy (DM1) in an animal.

### BACKGROUND

[0003] Myotonic dystrophy type 1 (DM1) is the most common form of muscular dystrophy in adults with an estimated frequency of 1 in 7,500 (Harper P S., Myotonic Dystrophy. London: W.B. Saunders Company; 2001). DM1 is an autosomal dominant disorder caused by expansion of a non-coding CTG repeat in DMPK1. DMPK1 is a gene encoding a cytosolic serine/threonine kinase (Brook J D, et al., Cell., 1992, 68(4):799-808). The physiologic functions and substrates of this kinase have not been fully determined. The expanded CTG repeat is located in the 3′ untranslated region (UTR) of DMPK1. This mutation leads to RNA dominance, a process in which expression of RNA containing an expanded CUG repeat (CUGexp) induces cell dysfunction (Osborne R J and Thornton C A., Human Molecular Genetics., 2006, 15(2): R162-R169).

[0004] The DMPK gene normally has 5-37 CTG repeats in the 3′ untranslated region. In myotonic dystrophy type I, this number is significantly expanded and is, for example, in the range of 50 to greater than 3,500 (Harper, Myotonic Dystrophy (Saunders, London, ed.3, 2001); Annu. Rev. Neurosci. 29: 259, 2006; EMBO J. 19: 4439, 2000; Curr Opin Neurol. 20: 572, 2007).

[0005] The CUGexp tract interacts with RNA binding proteins including muscleblind-like (MBNL) protein, a splicing factor, and causes the mutant transcript to be retained in nuclear foci. The toxicity of this RNA stems from sequestration of RNA binding proteins and activation of signaling pathways. Studies in animal models have shown that phenotypes of DM1 can be reversed if toxicity of CUGexp RNA is reduced (Wheeler T M, et al., Science., 2009, 325(5938):336-339; Mulders S A, et al., Proc Natl Acad Sci USA., 2009, 106(33):13915-13920).

[0006] In DM1, skeletal muscle is the most severely affected tissue, but the disease also has important effects on cardiac and smooth muscle, ocular lens, and brain. The cranial, distal limb, and diaphragm muscles are preferentially affected. Manual dexterity is compromised early, which causes several decades of severe disability. The median age at death is 55 years, usually from respiratory failure (de Die-Smulders C E, et al., Brain., 1998, 121(Pt 8):1557-1563).

[0007] Antisense technology is emerging as an effective means for modulating expression of certain gene products and may therefore prove to be uniquely useful in a number of therapeutic, diagnostic, and research applications for the modulation of DMPK1. Intramuscular injection of fully modified oligonucleotides targeting with the CAG-repeat were shown in mice to block formation of CUGexp-MBNL1 complexes, disperse nuclear foci of CUGexp transcripts, enhance the nucleocytoplasmic transport and translation of CUGexp transcripts, release MBNL proteins to the nucleoplasm, normalize alternative splicing of MBNL-dependent exons, and eliminate myotonia in CUGexp-expressing transgenic mice (Wheeler T M, et al., Science., 2009, 325(5938):336-339; WO2008/036406).

[0008] Presently there is no treatment that can modify the course of DM1. The burden of disease, therefore, is significant. It is, therefore, an object herein to provide compounds, compositions, and methods for treating DM1

### SUMMARY

[0009] Provided herein are methods, compounds, and compositions for inhibiting expression of DMPK and treating, preventing, delaying or ameliorating a DMPK related disease and or a symptom thereof. In certain embodiments, the compounds and compositions disclosed herein inhibit mutant DMPK or CUGexp DMPK.

[0010] Certain embodiments provide a method of reducing DMPK expression in an animal comprising administering to the animal a compound comprising a modified oligonucleotide as further described herein targeted to DMPK.

[0011] Certain embodiments provide a method of preferentially reducing CUGexp DMPK relative to wild-type DMPK, reducing myotonia, or reducing spliceopathy in an animal comprising administering to the animal a compound comprising a modified oligonucleotide, as further described herein, targeted to CUGexp DMPK. In certain instances, CUGexp DMPK transcripts are believed to be particularly sensitive to antisense knockdown via nuclear ribonucleases (such as RNase H), because of their longer residence time in the nucleus, and this sensitivity is thought to permit effective antisense inhibition of CUGexp DMPK transcripts in relevant tissues such as muscle despite the biodistribution barriers to tissue uptake of antisense oligonucleotides. Antisense mechanisms that do not elicit cleavage via nuclear ribonucleases, such as the CAG-repeat ASOs described in, for example, Wheeler T M, et al., Science., 2009, 325(5938):336-339 and WO2008/036406, do not provide the same therapeutic advantage.

[0012] Certain embodiments provide a method of treating an animal having type 1 myotonic dystrophy. In certain embodiments, the method includes administering to the animal a therapeutically effective amount of a compound comprising a modified oligonucleotide as further described herein targeted to DMPK. In certain embodiments, the method includes identifying an animal with type 1 myotonic dystrophy.

[0013] Certain embodiments provide a method of treating, preventing, delaying, or ameliorating symptoms and outcomes associated with development of DM1 including muscle stiffness, myotonia, disabling distal weakness, weakness in face and jaw muscles, difficulty in swallowing, drooping of the eyelids (ptosis), weakness of neck muscles, weakness in arm and leg muscles, persistent muscle pain, hypersomnia, muscle wasting, dysphagia, respiratory insufficiency, irregular heartbeat, heart muscle damage, apathy, insulin resistance, and cataracts. Certain embodiments provide a method of treating, preventing, delaying, or ameliorating symptoms and outcomes associated with development of DM1 in children, including, developmental delays, learning problems, language and speech issues, and personality development issues.

[0014] Certain embodiments provide a method of administering an antisense oligonucleotide to counteract RNA dominance by directing the cleavage of pathogenic transcripts.

[0015] In certain embodiments, the DMPK has a sequence as set forth in GenBank Accession No. NM_001081560.1 (incorporated herein as SEQ ID NO: 1). In certain embodiments, the DMPK has the sequence as set forth in GenBank Accession No. NT_011109.15 truncated from nucleotides 18540696 to 18555106 (incorporated herein as SEQ ID NO: 2). In certain embodiments, the DMPK has the sequence as set forth in GenBank Accession No. NT_039413.7 truncated from nucleotides 16666001 to 16681000 (incorporated herein as SEQ ID NO: 3). In certain embodiments, the DMPK has the sequence as set forth in GenBank Accession No. NM_032418.1 (incorporated herein as SEQ ID NO: 4). In certain embodiments, the DMPK has the sequence as set forth in GenBank Accession No. AI007148.1 (incorporated herein as SEQ ID NO: 5). In certain embodiments, the DMPK has the sequence as set forth in GenBank Accession No. AI304033.1 (incorporated herein as SEQ ID NO: 6). In certain embodiments, the DMPK has the sequence as set forth in GenBank Accession No. BC024150.1 (incorporated herein as SEQ ID NO: 7). In certain embodiments, the DMPK has the sequence as set forth in GenBank Accession No. BC056615.1 (incorporated herein as SEQ ID NO: 8). In certain embodiments, the DMPK has the sequence as set forth in GenBank Accession No. BC075715.1 (incorporated herein as SEQ ID NO: 9). In certain embodiments, the DMPK has the sequence as set forth in GenBank Accession No. BU519245.1 (incorporated herein as SEQ ID NO: 10). In certain embodiments, the DMPK has the sequence as set forth in GenBank Accession No. CB247909.1 (incorporated herein as SEQ ID NO: 11). In certain embodiments, the DMPK has the sequence as set forth in GenBank Accession No. CX208906.1 (incorporated herein as SEQ ID NO: 12). In certain embodiments, the DMPK has the sequence as set forth in GenBank Accession No. CX732022.1 (incorporated herein as SEQ ID NO: 13). In certain embodiments, the DMPK has the sequence as set forth in GenBank Accession No. S60315.1 (incorporated herein as SEQ ID NO: 14). In certain embodiments, the DMPK has the sequence as set forth in GenBank Accession No. S60316.1 (incorporated herein as SEQ ID NO: 15). In certain embodiments, the DMPK has the sequence as set forth in GenBank Accession No. NM_001081562.1 (incorporated herein as SEQ ID NO: 16). In certain embodiments, the DMPK has the sequence as set forth in GenBank Accession No. NM_001100.3 (incorporated herein as SEQ ID NO: 17).

[0016] The present disclosure provides the following non-limiting numbered embodiments:
[0017] Embodiment 1. A compound comprising a modified oligonucleotide consisting of 10-30 linked nucleosides and having a nucleobase sequence comprising a complementary region comprising at least 8 contiguous nucleobases complementary to a target region of equal length of a DMPK nucleic acid.
[0018] Embodiment 2. The compound of embodiment 1, wherein at least one nucleoside of the modified oligonucleotide comprises a bicyclic sugar selected from among cEt, LNA, α-L-LNA, ENA and 2′-thio LNA.
[0019] Embodiment 3. The compound of any of embodiments 1 to 2, wherein the target region is exon 9 of a DMPK nucleic acid.
[0020] Embodiment 4. The compound of any of embodiments 1 to 3, wherein the complementary region comprises at least 10 contiguous nucleobases complementary to a target region of equal length of a DMPK transcript.
[0021] Embodiment 5. The compound of any of embodiments 1 to 3, wherein the complementary region comprises at least 12 contiguous nucleobases complementary to a target region of equal length of a DMPK nucleic acid.
[0022] Embodiment 6. The compound of any of embodiments 1 to 3, wherein the complementary region comprises at least 14 contiguous nucleobases complementary to a target region of equal length of a DMPK nucleic acid.
[0023] Embodiment 7. The compound of any of embodiments 1 to 3, wherein the complementary region comprises at least 16 contiguous nucleobases complementary to a target region of equal length of a DMPK nucleic acid.
[0024] Embodiment 8. The compound of any of embodiments 1 to 7, wherein the DMPK nucleic acid is a DMPK pre-mRNA Embodiment 9. The compound of any of embodiments 1 to 7, wherein the DMPK nucleic acid is a DMPK mRNA.
[0025] Embodiment 10. The compound of any of embodiments 1 to 9, wherein the DMPK nucleic acid has a nucleobase sequence selected from among SEQ ID NO: 1 and SEQ ID NO: 2.
[0026] Embodiment 11. The compound of any of embodiments 1 to 10, wherein the modified oligonucleotide has a nucleobase sequence comprising a complementary region comprising at least 10 contiguous nucleobases complementary to a target region of equal length of SEQ ID NO: 1 or SEQ ID NO: 2.
[0027] Embodiment 12. The compound of embodiments 1 to 10, wherein the modified oligonucleotide has a nucleobase sequence comprising a complementary region comprising at least 12 contiguous nucleobases complementary to a target region of equal length of SEQ ID NO: 1 or SEQ ID NO: 2.
[0028] Embodiment 13. The compound of embodiments 1 to 10, wherein the modified oligonucleotide has a nucleobase sequence comprising a complementary region comprising at least 14 contiguous nucleobases complementary to a target region of equal length of SEQ ID NO: 1 or SEQ ID NO: 2.
[0029] Embodiment 14. The compound of embodiments 1 to 10, wherein the modified oligonucleotide has a nucleobase sequence comprising a complementary region comprising at least 16 contiguous nucleobases complementary to a target region of equal length of SEQ ID NO: 1 or SEQ ID NO: 2.
[0030] Embodiment 15. The compound of any of embodiments 1 to 14, wherein the target region is from nucleobase 1343 to nucleobase 1368 of SEQ ID NO.: 1.
[0031] Embodiment 16. The compound of any of embodiments 1 to 14, wherein the target region is from nucleobase 1317 to nucleobase 1366 of SEQ ID NO.: 1.
[0032] Embodiment 17. The compound of any of embodiments 1 to 14, wherein the target region is from nucleobase 2748 to nucleobase 2791 of SEQ ID NO.: 1.
[0033] Embodiment 18. The compound of any of embodiments 1 to 14, wherein the target region is from nucleobase 730 to nucleobase 748 of SEQ ID NO.: 1.
[0034] Embodiment 19. The compound of any of embodiments 1 to 14, wherein the target region is from nucleobase 10195 to nucleobase 10294 of SEQ ID NO.: 2.
[0035] Embodiment 20. The compound of any of embodiments 1 to 14, wherein the target region is from nucleobase 10195 to nucleobase 10294 of SEQ ID NO.: 2.
[0036] Embodiment 21. The compound of any of embodiments 1 to 14, wherein the target region is from nucleobase 10201 to nucleobase 10216 of SEQ ID NO.: 2.
[0037] Embodiment 22. The compound of any of embodiments 1 to 14, wherein the target region is from nucleobase 10202 to nucleobase 10218 of SEQ ID NO.: 2.
[0038] Embodiment 23. The compound of any of embodiments 1 to 22, wherein the modified oligonucleotide has a nucleobase sequence that is at least 80% complementary to the target region over the entire length of the oligonucleotide.
[0039] Embodiment 24. The compound of any of embodiments 1 to 22, wherein the modified oligonucleotide has a nucleobase sequence that is at least 90% complementary to the target region over the entire length of the oligonucleotide.
[0040] Embodiment 25. The compound of any of embodiments 1 to 22, wherein the modified oligonucleotide has a nucleobase sequence that is at least 100% complementary to the target region over the entire length of the oligonucleotide.
[0041] Embodiment 26. The compound of any of embodiments 1-25 having a nucleobase sequence comprising at least 8 contiguous nucleobases of a sequence recited in any of SEQ ID NOs: 23-874.
[0042] Embodiment 27. The compound of any of embodiments 1 to 25, wherein the modified oligonucleotide has a nucleobase sequence comprising at least 10 contiguous nucleobases of sequence recited in SEQ ID NOs: 23-32.
[0043] Embodiment 28. The compound of any of embodiments 1 to 25, wherein the modified oligonucleotide has a nucleobase sequence comprising at least 12 contiguous nucleobases of sequence recited in SEQ ID NOs: 23-32.
[0044] Embodiment 29. The compound of any of embodiments 1 to 25, wherein the modified oligonucleotide has a nucleobase sequence comprising at least 14 contiguous nucleobases of sequence recited in SEQ ID NOs: 23-32.
[0045] Embodiment 30. The compound of any of embodiments 1 to 25, wherein the modified oligonucleotide has a nucleobase sequence comprising at least 16 contiguous nucleobases of sequence recited in SEQ ID NOs: 23-32.
[0046] Embodiment 31. The compound of any of embodiments 1 to 30, wherein the modified oligonucleotide has a nucleobase sequence that consists of the sequence recited in SEQ ID NO: 23.
[0047] Embodiment 32. The compound of any of embodiments 1 to 14, wherein the modified oligonucleotide has a nucleobase sequence that consists of the sequence recited in SEQ ID NO: 25.
[0048] Embodiment 33. The compound of any of embodiments 1 to 14, wherein the modified oligonucleotide has a nucleobase sequence that consists of the sequence recited in SEQ ID NO: 26.
[0049] Embodiment 34. The compound of any of embodiments 1 to 14, wherein the modified oligonucleotide has a nucleobase sequence that consists of the sequence recited in SEQ ID NO: 27.
[0050] Embodiment 35. The compound of any of embodiments 1 to 14, wherein the modified oligonucleotide has a nucleobase sequence that consists of the sequence recited in SEQ ID NO: 28.
[0051] Embodiment 36. The compound of any of embodiments 1 to 14, wherein the modified oligonucleotide has a nucleobase sequence that consists of the sequence recited in SEQ ID NO: 29.
[0052] Embodiment 37. The compound of any of embodiments 1 to 14, wherein the modified oligonucleotide has a nucleobase sequence that consists of the sequence recited in SEQ ID NO: 30.
[0053] Embodiment 38. The compound of any of embodiments 1 to 14, wherein the modified oligonucleotide has a nucleobase sequence that consists of the sequence recited in SEQ ID NO: 31.
[0054] Embodiment 39. The compound of any of embodiments 1 to 14, wherein the modified oligonucleotide has a nucleobase sequence that consists of the sequence recited in SEQ ID NO: 32.
[0055] Embodiment 40. The compound of any of embodiments 1 to 14, wherein the modified oligonucleotide has a nucleobase sequence comprising the sequence recited in SEQ ID NO: 23, 24, 25, 26, 27, 28, 29, 30, 31, or 32.
[0056] Embodiment 41. The compound of any of embodiments 1 to 14, wherein the modified oligonucleotide has a nucleobase sequence comprising the sequence recited in SEQ ID NO: 23, 25, 26, 27, 28, 29, 30, 31, or 32.
[0057] Embodiment 42. The compound of any of embodiments 1 to 14, wherein the modified oligonucleotide has a nucleobase sequence comprising the sequence recited in SEQ ID NO: 33-874.
[0058] Embodiment 43. The compound of any of embodiments 1 to 42, wherein the nucleobase sequence of the modified oligonucleotide is at least 90% complementary to SEQ ID NOs: 1-19.
[0059] Embodiment 44. The compound of any of embodiments 1 to 34, wherein the nucleobase sequence of the modified oligonucleotide is 100% complementary to SEQ ID NOs: 1-19.
[0060] Embodiment 45. The compound of any of embodiments 1 to 30, wherein the modified oligonucleotide consists of 16 linked nucleosides.
[0061] Embodiment 46. The compound of any of embodiments 1 to 30, wherein the modified oligonucleotide consists of 17 linked nucleosides.
[0062] Embodiment 47. The compound of any of embodiments 1 to 30, wherein the modified oligonucleotide consists of 18 linked nucleosides.
[0063] Embodiment 48. The compound of any of embodiments 1 to 30, wherein the modified oligonucleotide consists of 19 linked nucleosides.
[0064] Embodiment 49. The compound of any of embodiments 1 to 30, wherein the modified oligonucleotide consists of 20 linked nucleosides.
[0065] Embodiment 50. The compound of any of embodiments 1 to 49, wherein the modified oligonucleotide is a single-stranded oligonucleotide.
[0066] Embodiment 51. The compound of any of embodiments 1 to 50 wherein at least one nucleoside comprises a modified sugar.
[0067] Embodiment 52. The compound of any of embodiments 1 to 51 wherein at least two nucleosides comprise a modified sugar.
[0068] Embodiment 53. The compound of embodiment 52, wherein each of the modified sugars have the same modification.
[0069] Embodiment 54. The compound of embodiment 52, wherein at least one the modified sugars has a different modification.
[0070] Embodiment 55. The compound of any of embodiments 51 to 54, wherein at least one modified sugar is a bicyclic sugar.
[0071] Embodiment 56. The compound of embodiment 55, wherein the bicyclic sugar is selected from among cEt, LNA, α-L-LNA, ENA and 2′-thio LNA.
[0072] Embodiment 57. The compound of embodiment 56, wherein the bicyclic sugar comprises cEt.
[0073] Embodiment 58. The compound of embodiment 56, wherein the bicyclic sugar comprises LNA.
[0074] Embodiment 59. The compound of embodiment 56, wherein the bicyclic sugar comprises α-L-LNA.
[0075] Embodiment 60. The compound of embodiment 56, wherein the bicyclic sugar comprises ENA.
[0076] Embodiment 61. The compound of embodiment 56, wherein the bicyclic sugar comprises 2′-thio LNA.
[0077] Embodiment 62. The compound of any of embodiments 1 to 61, wherein at least one modified sugar comprises a 2′-substituted nucleoside.
[0078] Embodiment 63. The compound of embodiment 62, wherein the 2′-substituted nucleoside is selected from among: 2′-OCH₃, 2′-F, and 2′-O-methoxyethyl.
[0079] Embodiment 64. The compound of any of embodiments 1 to 63, wherein at least one modified sugar comprises a 2′-O-methoxyethyl.
[0080] Embodiment 65. The compound of any of embodiments 1 to 64, wherein at least one nucleoside comprises a modified nucleobase.
[0081] Embodiment 66. The compound of embodiment 65, wherein the modified nucleobase is a 5-methylcytosine.
[0082] Embodiment 67. The compound of any of embodiments 1 to 67, wherein each cytosine is a 5-methylcytosine.
[0083] Embodiment 68. The compound of any of embodiments 1 to 67, wherein the modified oligonucleotide comprises:
   [0084] a. a gap segment consisting of linked deoxynucleosides;
   [0085] b. a 5′ wing segment consisting of linked nucleosides;
   [0086] c. a 3′ wing segment consisting of linked nucleosides;
   [0087] d. wherein the gap segment is positioned between the 5′ wing segment and the 3′ wing segment and wherein each nucleoside of each wing segment comprises a modified sugar.
[0088] Embodiment 69. The compound of embodiment 68, wherein the modified oligonucleotide consists of 16 linked nucleosides.
[0089] Embodiment 70. The compound of embodiment 68, wherein the modified oligonucleotide consists of 17 linked nucleosides.
[0090] Embodiment 71. The compound of embodiment 68, wherein the modified oligonucleotide consists of 18 linked nucleosides.
[0091] Embodiment 72. The compound of embodiment 68, wherein the modified oligonucleotide consists of 19 linked nucleosides.
[0092] Embodiment 73. The compound of embodiment 68, wherein the modified oligonucleotide consists of 20 linked nucleosides.
[0093] Embodiment 74. The compound of any of embodiments 68 to 73, wherein the 5′-wing segment consists of two linked nucleosides.
[0094] Embodiment 75. The compound of any of embodiments 68 to 73, wherein the 5′-wing segment consists of three linked nucleosides.
[0095] Embodiment 76. The compound of any of embodiments 68 to 73, wherein the 5′-wing segment consists of four linked nucleosides.
[0096] Embodiment 77. The compound of any of embodiments 68 to 73, wherein the 5′-wing segment consists of five linked nucleosides.
[0097] Embodiment 78. The compound of any of embodiments 68 to 73, wherein the 5′-wing segment consists of six linked nucleosides.
[0098] Embodiment 79. The compound of any of embodiments 68 to 78, wherein the 3′-wing segment consists of two linked nucleosides.
[0099] Embodiment 80. The compound of any of embodiments 68 to 78, wherein the 3′-wing segment consists of three linked nucleosides.
[0100] Embodiment 81. The compound of any of embodiments 68 to 78, wherein the 3′-wing segment consists of four linked nucleosides.
[0101] Embodiment 82. The compound of any of embodiments 68 to 78, wherein the 3′-wing segment consists of five linked nucleosides.
[0102] Embodiment 83. The compound of any of embodiments 68 to 78, wherein the 3′-wing segment consists of six linked nucleosides.
[0103] Embodiment 84. The compound of any of embodiments 68 to 83, wherein the gap segment consists of six linked deoxynucleosides.
[0104] Embodiment 85. The compound of any of embodiments 68 to 83, wherein the gap segment consists of seven linked deoxynucleosides.
[0105] Embodiment 86. The compound of any of embodiments 68 to 83, wherein the gap segment consists of eight linked deoxynucleosides.
[0106] Embodiment 87. The compound of any of embodiments 68 to 83, wherein the gap segment consists of nine linked deoxynucleosides.
[0107] Embodiment 88. The compound of any of embodiments 68 to 83, wherein the gap segment consists of ten linked deoxynucleosides.
[0108] Embodiment 89. The compound of any of embodiments 1 to 31, 34, 37 to 45, or 53 to 88, wherein the modified oligonucleotide consists of 16 linked nucleosides and comprises:
   [0109] a. a gap segment consisting of ten linked deoxynucleosides;
   [0110] b. a 5′ wing segment consisting of three linked nucleosides;
   [0111] c. a 3′ wing segment consisting of three linked nucleosides;
   [0112] d. wherein the gap segment is positioned between the 5′ wing segment and the 3′ wing segment, and wherein each nucleoside of each wing segment comprises a bicyclic sugar.
[0113] Embodiment 90. The compound of any of embodiments 1 to 31, 34, 37 to 45, or 53 to 88, wherein the modified oligonucleotide consists of 16 linked nucleosides and comprises:
   [0114] a. a gap segment consisting of eight linked deoxynucleosides;
   [0115] b. a 5′ wing segment consisting of four linked nucleosides and having an AABB 5′-wing motif;
   [0116] c. a 3′ wing segment consisting of four linked nucleosides and having a BBAA 3′-wing motif;
   [0117] d. wherein the gap segment is positioned between the 5′ wing segment and the 3′ wing segment.
[0118] Embodiment 91. The compound of any of embodiments 1 to 30, 35, 36, 46, or 50 to 88, wherein the modified oligonucleotide consists of 17 linked nucleosides and comprises:
   [0119] a. a gap segment consisting of seven linked deoxynucleosides;
   [0120] b. a 5′ wing segment consisting of five linked nucleosides and having an AAABB 5′-wing motif;
   [0121] c. a 3′ wing segment consisting of five linked nucleosides and having a BBAAA 3′-wing motif;
   [0122] d. wherein the gap segment is positioned between the 5′ wing segment and the 3′ wing segment.
[0123] Embodiment 92. The compound of any of embodiments 1 to 31, 34, 37 to 45, or 53 to 88, wherein the modified oligonucleotide consists of 16 linked nucleosides and comprises:
   [0124] a. a gap segment consisting of eight linked deoxynucleosides;
   [0125] b. a 5′ wing segment consisting of four linked nucleosides and having a E-E-K-K 5′-wing motif;
   [0126] c. a 3′ wing segment consisting of four linked nucleosides and having a K-K-E-E 3′-wing motif;
   [0127] d. wherein the gap segment is positioned between the 5′ wing segment and the 3′ wing segment, and wherein each E represents 2′-O-methoxyethyl sugar and each K represents a cEt sugar.
[0128] Embodiment 93. The compound of any of embodiments 1 to 30, 35, 36, 46, or 50 to 88, wherein the modified oligonucleotide consists of 17 linked nucleosides and comprises:
   [0129] a. a gap segment consisting of seven linked deoxynucleosides;
   [0130] b. a 5′ wing segment consisting of five linked nucleosides and having an E-E-E-K-K 5′-wing motif;
   [0131] c. a 3′ wing segment consisting of five linked nucleosides and having a K-K-E-E-E 3′-wing motif;
   [0132] d. wherein the gap segment is positioned between the 5′ wing segment and the 3′ wing segment, and wherein each E represents 2′-O-methoxyethyl sugar and each K represents a cEt sugar.
[0133] Embodiment 94. The compound of any of embodiments 1 to 30, 32, 33, or 49 to 88, wherein the modified oligonucleotide consists of 20 linked nucleosides and comprises:
   [0134] a. a gap segment consisting of ten linked deoxynucleosides;
   [0135] b. a 5′ wing segment consisting of five linked nucleosides;
   [0136] c. a 3′ wing segment consisting of five linked nucleosides;
   [0137] d. wherein the gap segment is positioned between the 5′ wing segment and the 3′ wing segment, and wherein each nucleoside of each wing segment comprises a 2′-O-methoxyethyl sugar.
[0138] Embodiment 95. The compound of any of embodiments 1 to 31, 34, 37 to 45, or 53 to 88, wherein the modified oligonucleotide consists of 16 linked nucleosides and comprises:
   [0139] a. a gap segment consisting of ten linked deoxynucleosides;
   [0140] b. a 5′ wing segment consisting of three linked nucleosides;
   [0141] c. a 3′ wing segment consisting of three linked nucleosides;
   [0142] d. wherein the gap segment is positioned between the 5′ wing segment and the 3′ wing segment, and wherein each nucleoside of each wing segment comprises a cEt sugar.
[0143] Embodiment 96. The compound of any of embodiments 1 to 67, wherein the modified oligonucleotide comprises at least 8 contiguous nucleobases complementary to a target region within nucleobase 1343 and nucleobase 1368 of SEQ ID NO.: 1, and wherein the modified oligonucleotide comprises:
   [0144] a. a gap segment consisting of linked deoxynucleosides;
   [0145] b. a 5′ wing segment consisting of linked nucleosides;
   [0146] c. a 3′ wing segment consisting of linked nucleosides;
   [0147] d. wherein the gap segment is positioned between the 5′ wing segment and the 3′ wing segment and wherein each nucleoside of each wing segment comprises a modified sugar.
[0148] Embodiment 97. The compound of embodiment 96, wherein each modified sugar in the 5′-wing segment has the same modifications.
[0149] Embodiment 98. The compound of embodiment 96, wherein at least two modified sugars in the 5′-wing segment have different modifications.
[0150] Embodiment 99. The compound of any of embodiments 96 to 98 wherein each modified sugar in the 3′-wing segment has the same modifications.
[0151] Embodiment 100. The compound of any of embodiments 96 to 98, wherein at least two modified sugars in the 3′-wing segment have different modification.
[0152] Embodiment 101. The compound of embodiment 96, wherein at least one modified sugar is a bicyclic sugar selected from among cEt, LNA, α-L-LNA, ENA and 2′-thio LNAs.
[0153] Embodiment 102. The compound of embodiment 90 to 91, wherein each B represents a bicyclic sugar selected from among cEt, LNA, α-L-LNA, ENA and 2′-thio LNA.
[0154] Embodiment 103. The compound of embodiment 102, wherein the bicyclic sugar comprises BNA.
[0155] Embodiment 104. The compound of embodiment 102, wherein the bicyclic sugar comprises cEt.
[0156] Embodiment 105. The compound of embodiment 102, wherein the bicyclic sugar comprises LNA.
[0157] Embodiment 106. The compound of embodiment 102, wherein the bicyclic sugar comprises α-L-LNA.
[0158] Embodiment 107. The compound of embodiment 102, wherein the bicyclic sugar comprises ENA.
[0159] Embodiment 108. The compound of embodiment 102, wherein the bicyclic sugar comprises 2′-thio LNA.
[0160] Embodiment 109. The compound of embodiment 90 or 91, wherein each A represents a 2′-substituted nucleoside is selected from among: 2′-OCH₃, 2′-F, and 2′-O-methoxyethyl.
[0161] Embodiment 110. The compound of embodiment 109, wherein the 2′-substituted nucleoside comprises 2′-O-methoxyethyl.
[0162] Embodiment 111. The compound of any of embodiments 1 to 111, wherein at least one internucleoside linkage is a modified internucleoside linkage.
[0163] Embodiment 112. The compound of any of embodiments 1 to 111, wherein each internucleoside linkage is a phosphorothioate internucleoside linkage.
[0164] Embodiment 113. A compound consisting of ISIS 486178.
[0165] Embodiment 114. A compound consisting of ISIS 512497.
[0166] Embodiment 115. A compound consisting of ISIS 598768.
[0167] Embodiment 116. A compound consisting of ISIS 594300.
[0168] Embodiment 117. A compound consisting of ISIS 594292.
[0169] Embodiment 118. A compound consisting of ISIS 569473.
[0170] Embodiment 119. A compound consisting of ISIS 598769.
[0171] Embodiment 120. A compound consisting of ISIS 570808.
[0172] Embodiment 121. A compound consisting of ISIS 598777.
[0173] Embodiment 122. A compound having a nucleobase sequence as set forth in SEQ ID NO: 23, wherein the modified oligonucleotide consists of 16 linked nucleosides and comprises:
   [0174] a. a gap segment consisting of ten linked deoxynucleosides;
   [0175] b. a 5′ wing segment consisting of three linked nucleosides;
   [0176] c. a 3′ wing segment consisting of three linked nucleosides;
   [0177] d. wherein the gap segment is positioned between the 5′ wing segment and the 3′ wing segment;
   [0178] e. wherein each nucleoside of each wing segment comprises a bicyclic sugar;
   [0179] f. wherein each internucleoside linkage is a phosphorothioate internucleoside linkage; and
   [0180] g. wherein each cytosine residue is a 5-methyl cytosine.
[0181] Embodiment 123. A compound having a nucleobase sequence as set forth in SEQ ID NO: 29, wherein the modified oligonucleotide consists of 16 linked nucleosides and comprises:
   [0182] a. a gap segment consisting of ten linked deoxynucleosides;
   [0183] b. a 5′ wing segment consisting of three linked nucleosides;
   [0184] c. a 3′ wing segment consisting of three linked nucleosides;
   [0185] d. wherein the gap segment is positioned between the 5′ wing segment and the 3′ wing segment;
   [0186] e. wherein each nucleoside of each wing segment comprises a bicyclic sugar;
   [0187] f. wherein each internucleoside linkage is a phosphorothioate internucleoside linkage; and
   [0188] g. wherein each cytosine residue is a 5-methyl cytosine.
[0189] Embodiment 124. A compound having a nucleobase sequence as set forth in SEQ ID NO: 31, wherein the modified oligonucleotide consists of 16 linked nucleosides and comprises:
   [0190] a. a gap segment consisting of ten linked deoxynucleosides;
   [0191] b. a 5′ wing segment consisting of three linked nucleosides;
   [0192] c. a 3′ wing segment consisting of three linked nucleosides;
   [0193] d. wherein the gap segment is positioned between the 5′ wing segment and the 3′ wing segment;
   [0194] e. wherein each nucleoside of each wing segment comprises a bicyclic sugar;
   [0195] f. wherein each internucleoside linkage is a phosphorothioate internucleoside linkage; and
   [0196] g. wherein each cytosine residue is a 5-methyl cytosine.
[0197] Embodiment 125. A compound having a nucleobase sequence as set forth in SEQ ID NO: 26, wherein the modified oligonucleotide consists of 16 linked nucleosides and comprises:
   [0198] a. a gap segment consisting of eight linked deoxynucleosides;
   [0199] b. a 5′ wing segment consisting of four linked nucleosides and having a E-E-K-K 5′-wing motif;
   [0200] c. a 3′ wing segment consisting of four linked nucleosides and having a K-K-E-E 3′-wing motif;
   [0201] d. wherein the gap segment is positioned between the 5′ wing segment and the 3′ wing segment;
   [0202] e. wherein each E represents 2′-O-methoxyethyl sugar and each K represents a cEt sugar;
   [0203] f. wherein each internucleoside linkage is a phosphorothioate internucleoside linkage; and
   [0204] g. wherein each cytosine residue is a 5-methyl cytosine.
[0205] Embodiment 126. A compound having a nucleobase sequence as set forth in SEQ ID NO: 30, wherein the modified oligonucleotide consists of 16 linked nucleosides and comprises:
   [0206] a. a gap segment consisting of eight linked deoxynucleosides;
   [0207] b. a 5′ wing segment consisting of four linked nucleosides and having a E-E-K-K 5′-wing motif;
   [0208] c. a 3′ wing segment consisting of four linked nucleosides and having a K-K-E-E 3′-wing motif;
   [0209] d. wherein the gap segment is positioned between the 5′ wing segment and the 3′ wing segment;
   [0210] e. wherein each E represents 2′-O-methoxyethyl sugar and each K represents a cEt sugar;
   [0211] f. wherein each internucleoside linkage is a phosphorothioate internucleoside linkage; and
   [0212] g. wherein each cytosine residue is a 5-methyl cytosine.
[0213] Embodiment 127. A compound having a nucleobase sequence as set forth in SEQ ID NO: 32, wherein the modified oligonucleotide consists of 16 linked nucleosides and comprises:
   [0214] a. a gap segment consisting of eight linked deoxynucleosides;
   [0215] b. a 5′ wing segment consisting of four linked nucleosides and having a E-E-K-K 5′-wing motif;
   [0216] c. a 3′ wing segment consisting of four linked nucleosides and having a K-K-E-E 3′-wing motif;
   [0217] d. wherein the gap segment is positioned between the 5′ wing segment and the 3′ wing segment;
   [0218] e. wherein each E represents 2′-O-methoxyethyl sugar and each K represents a cEt sugar;
   [0219] f. wherein each internucleoside linkage is a phosphorothioate internucleoside linkage; and
   [0220] g. wherein each cytosine residue is a 5-methyl cytosine.
[0221] Embodiment 128. A compound having a nucleobase sequence as set forth in SEQ ID NO: 27, wherein the modified oligonucleotide consists of 17 linked nucleosides and comprises:
   [0222] a. a gap segment consisting of seven linked deoxynucleosides;
   [0223] b. a 5′ wing segment consisting of five linked nucleosides and having an E-E-E-K-K 5′-wing motif;
   [0224] c. a 3′ wing segment consisting of five linked nucleosides and having a K-K-E-E-E 3′-wing motif;
   [0225] d. wherein the gap segment is positioned between the 5′ wing segment and the 3′ wing segment;
   [0226] e. wherein each E represents 2′-O-methoxyethyl sugar and each K represents a cEt sugar;
   [0227] f. wherein each internucleoside linkage is a phosphorothioate internucleoside linkage; and
   [0228] g. wherein each cytosine residue is a 5-methyl cytosine.
[0229] Embodiment 129. A compound having a nucleobase sequence as set forth in SEQ ID NO: 28, wherein the modified oligonucleotide consists of 17 linked nucleosides and comprises:
   [0230] a. a gap segment consisting of seven linked deoxynucleosides;
   [0231] b. a 5′ wing segment consisting of five linked nucleosides and having an E-E-E-K-K 5′-wing motif;
   [0232] c. a 3′ wing segment consisting of five linked nucleosides and having a K-K-E-E-E 3′-wing motif;
   [0233] d. wherein the gap segment is positioned between the 5′ wing segment and the 3′ wing segment;
   [0234] e. wherein each E represents 2′-O-methoxyethyl sugar and each K represents a cEt sugar;
   [0235] f. wherein each internucleoside linkage is a phosphorothioate internucleoside linkage; and
   [0236] g. wherein each cytosine residue is a 5-methyl cytosine.
[0237] Embodiment 130. A compound having a nucleobase sequence as set forth in SEQ ID NO: 25, wherein the modified oligonucleotide consists of 20 linked nucleosides and comprises:
   [0238] a. a gap segment consisting of ten linked deoxynucleosides;
   [0239] b. a 5′ wing segment consisting of five linked nucleosides;
   [0240] c. a 3′ wing segment consisting of five linked nucleosides;
   [0241] d. wherein the gap segment is positioned between the 5′ wing segment and the 3′ wing segment;
   [0242] e. wherein each nucleoside of each wing segment comprises a 2′-O-methoxyethyl sugar;
   [0243] f. wherein each internucleoside linkage is a phosphorothioate internucleoside linkage; and
   [0244] g. wherein each cytosine residue is a 5-methyl cytosine.
[0245] Embodiment 131. The compound of any of embodiments 1 to 130 comprising a conjugate.
[0246] Embodiment 132. A composition comprising the compound of any of embodiments 1 to 131, and a pharmaceutically acceptable carrier or diluent.
[0247] Embodiment 133. A method of treating DM1 in an animal comprising administering to an animal in need thereof a compound according to any of embodiments 1 to 130, or a composition according to embodiment 132.
[0248] Embodiment 134. The method of embodiment 133, wherein the compound reduces DMPK mRNA levels.
[0249] Embodiment 135. The method of embodiment 133, wherein the compound reduces DMPK protein expression.
[0250] Embodiment 136. The method of embodiment 133, wherein the compound reduces CUGexp DMPK.
[0251] Embodiment 137. The method of embodiment 133, wherein the compound preferentially reduces CUGexp DMPK.
[0252] Embodiment 138. The method of embodiment 133, wherein the compound reduces CUGexp DMPK mRNA.
[0253] Embodiment 139. The method of embodiment 133, wherein the compound preferentially reduces CUGexp DMPK mRNA.
[0254] Embodiment 140. The method of embodiment 138 or 139, wherein the preferential reduction of CUGexp is in muscle tissue.
[0255] Embodiment 141. A method of reducing myotonia in an animal comprising administering to an animal in need thereof a compound according to any of embodiments 1 to 131, or a composition according to embodiment 132.
[0256] Embodiment 142. A method of reducing MBLN dependent spliceopathy in an animal comprising administering to an animal in need thereof a compound according to any of embodiments 1 to 131, or a composition according to embodiment 132.
[0257] Embodiment 143. The method of embodiment 138, wherein splicing of any of Sercal, m-Titin, Clcn1, and Zasp is corrected.
[0258] Embodiment 144. The method of any of embodiments 133 to 143, wherein the administering is systemic administration.
[0259] Embodiment 145. The method of any of embodiments 133 to 143, wherein the administering is parenteral administration.
[0260] Embodiment 146. The method of embodiment 144, wherein the systemic administration is any of subcutaneous administration, intravenous administration, intracerebroventricular administration, and intrathecal administration.
[0261] Embodiment 147. The method of any of embodiments 133 to 143, wherein the administration is not intramuscular administration.
[0262] Embodiment 148. The method of any of embodiments 133 to 143, wherein the animal is a human.
[0263] Embodiment 149. A method of reducing spliceopathy of Sercal in an animal in need thereof by administering a compound according to any of embodiments 1 to 131, or a composition according to embodiment 132, and thereby causing Sercal exon 22 inclusion.
[0264] Embodiment 150. A method of reducing spliceopathy of m-Titin in an animal in need thereof by administering a compound according to any of embodiments 1 to 131, or a composition according to embodiment 132, and thereby causing m-Titin exon 5 inclusion.
[0265] Embodiment 151. A method of reducing spliceopathy of Clcn1 in an animal in need thereof by administering a compound according to any of embodiments 1 to 131, or a composition according to embodiment 132, and thereby causing Clcn1 exon 7a inclusion.
[0266] Embodiment 152. A method of reducing spliceopathy of Zasp in an animal in need thereof by administering a compound according to any of embodiments 1 to 131, or a composition according to embodiment 132, and thereby causing Zasp exon 11 inclusion.
[0267] Embodiment 153. A method of reducing DMPK mRNA in a cell, comprising contacting a cell with a compound according to any of embodiments 1 to 131, or a composition according to embodiment 132.
[0268] Embodiment 154. A method of reducing DMPK protein in a cell, comprising contacting a cell with a compound according to any of embodiments 1 to 131, or a composition according to embodiment 132.
[0269] Embodiment 155. A method of reducing CUGexp mRNA in a cell, comprising contacting a cell with a compound according to any of embodiments 1 to 131, or a composition according to embodiment 132.
[0270] Embodiment 156. The method of any of embodiments 149 to 151, wherein the cell is in an animal.
[0271] Embodiment 157. The method of embodiment 156, wherein the animal is a human.
[0272] Embodiment 158. A method of achieving a preferential reduction of CUGexp DMPK RNA, comprising:
   [0273] a. selecting a subject having type 1 myotonic dystrophy or having a CUGexp DMPK RNA; and
   [0274] b. administering to said subject a compound according to any of embodiments 1 to 131, or a composition according to embodiment 132;
wherein said compound according to any of embodiments 1 to 131, or a composition according to embodiment 132, when bound to said CUGexp DMPK RNA, activates a ribonuclease, thereby achieving a preferential reduction of said CUGexp DMPK RNA.
[0275] Embodiment 159. A method of achieving a preferential reduction of CUGexp DMPK RNA, comprising:
   [0276] a. selecting a subject having type 1 myotonic dystrophy or having a CUGexp DMPK RNA; and
   [0277] b. systemically administering to said subject a compound according to any of embodiments 1 to 131, or a composition according to embodiment 132;
wherein said chemically-modified antisense oligonucleotide, when bound to said CUGexp DMPK RNA, achieves a preferential reduction of said CUGexp DMPK RNA.
[0278] Embodiment 160. A method of reducing spliceopathy in a subject suspected of having type 1 myotonic dystrophy or having a nuclear retained CUGexp DMPK RNA, comprising: administering to said subject a compound according to any of embodiments 1 to 131, or a composition according to embodiment 132,
wherein the compound according to any of embodiments 1 to 131, or a composition according to embodiment 132, when bound to said mutant DMPK RNA, activates a ribonuclease, thereby reducing spliceopathy.
[0279] Embodiment 161. A method of preferentially reducing CUGexp DMPK RNA, reducing myotonia or reducing spliceopathy in an animal comprising administering to the animal a compound according to any of embodiments 1 to 131 or a pharmaceutical composition of embodiment 132, wherein the compound reduces DMPK expression in the animal, thereby preferentially reducing CUGexp DMPK RNA, reducing myotonia, or reducing spliceopathy in the animal.
[0280] Embodiment 162. A method for treating an animal with type 1 myotonic dystrophy comprising
   [0281] identifying said animal with type 1 myotonic dystrophy,
   [0282] administering to said animal a therapeutically effective amount of a compound according to any of embodiments 1 to 131 or a pharmaceutical composition of embodiment 132,
   [0283] wherein said animal with type 1 myotonic dystrophy is treated.
[0284] Embodiment 163. A method of reducing DMPK expression comprising administering to an animal a compound according to any of embodiments 1 to 131 or a pharmaceutical composition of embodiment 132, wherein expression of DMPK is reduced.
[0285] Embodiment 164. A compound according to any of embodiments 1 to 131 or a pharmaceutical composition of embodiment 132, for use in treating DM1 in an animal.
[0286] Embodiment 165. A compound according to any of embodiments 1 to 131 or a pharmaceutical composition of embodiment 132, for use in reducing myotonia in an animal.
[0287] Embodiment 166. A compound according to any of embodiments 1 to 131 or a pharmaceutical composition of embodiment 132, for use in reducing MBLN dependent spliceopathy in an animal.

### DETAILED DESCRIPTION

[0288] It is to be understood that both the foregoing general description and the following detailed description are exemplary and explanatory only and are not restrictive of the invention, as claimed. Herein, the use of the singular includes the plural unless specifically stated otherwise. Herein, the use of “or” means “and/or” unless stated otherwise. Furthermore, the use of the term “including” as well as other forms, such as “includes” and “included”, is not limiting. Also, terms such as “element” or “component” encompass both elements and components comprising one unit and elements and components that comprise more than one subunit, unless specifically stated otherwise.

[0289] The section headings used herein are for organizational purposes only and are not to be construed as limiting the subject matter described. All documents, or portions of documents, cited in this application, including, but not limited to, patents, patent applications, articles, books, and treatises, are hereby expressly incorporated-by-reference for the portions of the document discussed herein, as well as in their entirety.

### Definitions

[0290] Unless specific definitions are provided, the nomenclature utilized in connection with, and the procedures and techniques of, analytical chemistry, synthetic organic chemistry, and medicinal and pharmaceutical chemistry described herein are those well known and commonly used in the art. Standard techniques can be used for chemical synthesis, and chemical analysis. Where permitted, all patents, applications, published applications and other publications, GENBANK Accession Numbers and associated sequence information obtainable through databases such as National Center for Biotechnology Information (NCBI) and other data referred to throughout in the disclosure herein are incorporated by reference for the portions of the document discussed herein, as well as in their entirety.

[0291] Unless otherwise indicated, the following terms have the following meanings:

[0292] “2′-O-methoxyethyl” (also 2′-MOE and 2′-O(CH₂)₂—OCH₃) refers to an O-methoxy-ethyl modification of the 2′ position of a furanosyl ring. A 2′-O-methoxyethyl modified sugar is a modified sugar.

[0293] “2′-O-methoxyethyl nucleotide” means a nucleotide comprising a 2′-O-methoxyethyl modified sugar moiety.

[0294] “5-methylcytosine” means a cytosine modified with a methyl group attached to position 5. A 5-methylcytosine is a modified nucleobase.

[0295] “About” means within ±7% of a value. For example, if it is stated, “the compound affected at least about 70% inhibition of DMPK”, it is implied that the DMPK levels are inhibited within a range of 63% and 77%.

[0296] “Active pharmaceutical agent” means the substance or substances in a pharmaceutical composition that provide a therapeutic benefit when administered to an animal. For example, in certain embodiments an antisense oligonucleotide targeted to DMPK is an active pharmaceutical agent.

[0297] “Active target region” or “target region” means a region to which one or more active antisense compounds is targeted. “Active antisense compounds” means antisense compounds that reduce target nucleic acid levels or protein levels.

[0298] “Administered concomitantly” refers to the co-administration of two agents in any manner in which the pharmacological effects of both are manifest in the patient at the same time. Concomitant administration does not require that both agents be administered in a single pharmaceutical composition, in the same dosage form, or by the same route of administration. The effects of both agents need not manifest themselves at the same time. The effects need only be overlapping for a period of time and need not be coextensive.

[0299] “Administering” means providing an agent to an animal, and includes, but is not limited to, administering by a medical professional and self-administering.

[0300] “Agent” means an active substance that can provide a therapeutic benefit when administered to an animal. “First Agent” means a therapeutic compound of the invention. For example, a first agent can be an antisense oligonucleotide targeting DMPK. “Second agent” means a second therapeutic compound of the invention (e.g. a second antisense oligonucleotide targeting DMPK) and/or a non-DMPK therapeutic compound.

[0301] “Amelioration” refers to a lessening of at least one indicator, sign, or symptom of an associated disease, disorder, or condition. The severity of indicators can be determined by subjective or objective measures, which are known to those skilled in the art.

[0302] “Animal” refers to a human or non-human animal, including, but not limited to, mice, rats, rabbits, dogs, cats, pigs, and non-human primates, including, but not limited to, monkeys and chimpanzees.

[0303] “Antisense activity” means any detectable or measurable activity attributable to the hybridization of an antisense compound to its target nucleic acid. In certain embodiments, antisense activity is a decrease in the amount or expression of a target nucleic acid or protein encoded by such target nucleic acid.

[0304] “Antisense compound” means an oligomeric compound that is capable of undergoing hybridization to a target nucleic acid through hydrogen bonding. Examples of antisense compounds include single-stranded and double-stranded compounds, such as, antisense oligonucleotides, siRNAs, shRNAs, snoRNAs, miRNAs, and satellite repeats.

[0305] “Antisense inhibition” means reduction of target nucleic acid levels or target protein levels in the presence of an antisense compound complementary to a target nucleic acid compared to target nucleic acid levels or target protein levels in the absence of the antisense compound.

[0306] “Antisense oligonucleotide” means a single-stranded oligonucleotide having a nucleobase sequence that permits hybridization to a corresponding region or segment of a target nucleic acid.

[0307] “Bicyclic sugar” means a furanosyl ring modified by the bridging of two non-geminal carbon ring atoms. A bicyclic sugar is a modified sugar.

[0308] “Bicyclic nucleic acid” or “BNA” refers to a nucleoside or nucleotide wherein the furanose portion of the nucleoside or nucleotide includes a bridge connecting two carbon atoms on the furanose ring, thereby forming a bicyclic ring system.

[0309] “Cap structure” or “terminal cap moiety” means chemical modifications, which have been incorporated at either terminus of an antisense compound.

[0310] “Chemically distinct region” refers to a region of an antisense compound that is in some way chemically different than another region of the same antisense compound. For example, a region having 2′-O-methoxyethyl nucleotides is chemically distinct from a region having nucleotides without 2′-O-methoxyethyl modifications.

[0311] “Chimeric antisense compound” means an antisense compound that has at least two chemically distinct regions.

[0312] “Co-administration” means administration of two or more agents to an individual. The two or more agents can be in a single pharmaceutical composition, or can be in separate pharmaceutical compositions. Each of the two or more agents can be administered through the same or different routes of administration. Co-administration encompasses parallel or sequential administration.

[0313] “Complementarity” means the capacity for pairing between nucleobases of a first nucleic acid and a second nucleic acid.

[0314] “Contiguous nucleobases” means nucleobases immediately adjacent to each other.

[0315] “CUGexp DMPK” means mutant DMPK RNA containing an expanded CUG repeat (CUGexp). The wild-type DMPK gene has 5-37 CTG repeats in the 3′ untranslated region. In a “CUGexp DMPK” (such as in a myotonic dystrophy type I patient) this number is significantly expanded and is, for example, in the range of 50 to greater than 3,500 (Harper, Myotonic Dystrophy (Saunders, London, ed.3, 2001); Annu. Rev. Neurosci. 29: 259, 2006; EMBO J. 19: 4439, 2000; Curr Opin Neurol. 20: 572, 2007).

[0316] “Diluent” means an ingredient in a composition that lacks pharmacological activity, but is pharmaceutically necessary or desirable. For example, the diluent in an injected composition can be a liquid, e.g. saline solution.

[0317] “DMPK” means any nucleic acid or protein of distrophia myotonica protein kinase. DMPK can be a mutant DMPK including CUGexp DMPK nucleic acid.

[0318] “DMPK expression” means the level of mRNA transcribed from the gene encoding DMPK or the level of protein translated from the mRNA. DMPK expression can be determined by art known methods such as a Northern or Western blot.

[0319] “DMPK nucleic acid” means any nucleic acid encoding DMPK. For example, in certain embodiments, a DMPK nucleic acid includes a DNA sequence encoding DMPK, an RNA sequence transcribed from DNA encoding DMPK (including genomic DNA comprising introns and exons), and an mRNA or pre-mRNA sequence encoding DMPK. “DMPK mRNA” means an mRNA encoding a DMPK protein.

[0320] “Dose” means a specified quantity of a pharmaceutical agent provided in a single administration, or in a specified time period. In certain embodiments, a dose can be administered in one, two, or more boluses, tablets, or injections. For example, in certain embodiments where subcutaneous administration is desired, the desired dose requires a volume not easily accommodated by a single injection, therefore, two or more injections can be used to achieve the desired dose. In certain embodiments, the pharmaceutical agent is administered by infusion over an extended period of time or continuously. Doses can be stated as the amount of pharmaceutical agent per hour, day, week, or month.

[0321] “Effective amount” or “therapeutically effective amount” means the amount of active pharmaceutical agent sufficient to effectuate a desired physiological outcome in an individual in need of the agent. The effective amount can vary among individuals depending on the health and physical condition of the individual to be treated, the taxonomic group of the individuals to be treated, the formulation of the composition, assessment of the individual's medical condition, and other relevant factors.

[0322] “Fully complementary” or “100% complementary” means each nucleobase of a nucleobase sequence of a first nucleic acid has a complementary nucleobase in a second nucleobase sequence of a second nucleic acid. In certain embodiments, a first nucleic acid is an antisense compound and a target nucleic acid is a second nucleic acid.

[0323] “Gapmer” means a chimeric antisense compound in which an internal region having a plurality of nucleosides that support RNase H cleavage is positioned between external regions having one or more nucleosides, wherein the nucleosides comprising the internal region are chemically distinct from the nucleoside or nucleosides comprising the external regions. The internal region can be referred to as a “gap segment” and the external regions can be referred to as “wing segments.”

[0324] “Gap-widened” means a chimeric antisense compound having a gap segment of 12 or more contiguous 2′-deoxyribonucleosides positioned between and immediately adjacent to 5′ and 3′ wing segments having from one to six nucleosides.

[0325] “Hybridization” means the annealing of complementary nucleic acid molecules. In certain embodiments, complementary nucleic acid molecules include an antisense compound and a target nucleic acid.

[0326] “Identifying an animal with type 1 myotonic dystrophy” means identifying an animal having been diagnosed with a type 1 myotonic dystrophy, disorder or condition or identifying an animal predisposed to develop a type 1 myotonic dystrophy, disorder or condition. For example, individuals with a familial history can be predisposed to type 1 myotonic dystrophy, disorder or condition. Such identification can be accomplished by any method including evaluating an individual's medical history and standard clinical tests or assessments.

[0327] “Immediately adjacent” means there are no intervening elements between the immediately adjacent elements.

[0328] “Individual” means a human or non-human animal selected for treatment or therapy.

[0329] “Internucleoside linkage” refers to the chemical bond between nucleosides.

[0330] “Linked nucleosides” means adjacent nucleosides which are bonded or linked together by an internucleoside linkage.

[0331] “Mismatch” or “non-complementary nucleobase” refers to the case when a nucleobase of a first nucleic acid is not capable of pairing with the corresponding nucleobase of a second or target nucleic acid.

[0332] “Modified internucleoside linkage” refers to a substitution or any change from a naturally occurring internucleoside bond (i.e. a phosphodiester internucleoside bond).

[0333] “Modified nucleobase” refers to any nucleobase other than adenine, cytosine, guanine, thymidine, or uracil. An “unmodified nucleobase” means the purine bases adenine (A) and guanine (G), and the pyrimidine bases thymine (T), cytosine (C), and uracil (U).

[0334] “Modified nucleotide” means a nucleotide having, independently, a modified sugar moiety, modified internucleoside linkage, or modified nucleobase. A “modified nucleoside” means a nucleoside having, independently, a modified sugar moiety or modified nucleobase.

[0335] “Modified oligonucleotide” means an oligonucleotide comprising at least one modified nucleoside and/or modified internucleoside linkage.

[0336] “Modified sugar” refers to a substitution or change from a natural sugar moiety. Modified sugars include substituted sugar moeities and surrogate sugar moieties.

[0337] “Motif” means the pattern of chemically distinct regions in an antisense compound.

[0338] “Myotonia” means an abnormally slow relaxation of a muscle after voluntary contraction or electrical stimulation.

[0339] “Nuclear ribonuclease” means a ribonuclease found in the nucleus. Nuclear ribonucleases include, but are not limited to, RNase H including RNase H1 and RNase H2, the double stranded RNase drosha and other double stranded RNases.

[0340] “Naturally occurring internucleoside linkage” means a 3′ to 5′ phosphodiester linkage.

[0341] “Natural sugar moiety” means a sugar found in DNA (2′-H) or RNA (2′-OH).

[0342] “Nucleic acid” refers to molecules composed of monomeric nucleotides. A nucleic acid includes ribonucleic acids (RNA), deoxyribonucleic acids (DNA), single-stranded nucleic acids, double-stranded nucleic acids, small interfering ribonucleic acids (siRNA), and microRNAs (miRNA). A nucleic acid can also comprise a combination of these elements in a single molecule.

[0343] “Nucleobase” means a heterocyclic moiety capable of pairing with a base of another nucleic acid.

[0344] “Nucleobase sequence” means the order of contiguous nucleobases independent of any sugar, linkage, or nucleobase modification.

[0345] “Nucleoside” means a nucleobase linked to a sugar. In certain embodiments, a nucleoside is linked to a phosphate group.

[0346] “Nucleoside mimetic” includes those structures used to replace the sugar or the sugar and the base and not necessarily the linkage at one or more positions of an oligomeric compound such as for example nucleoside mimetics having morpholino, cyclohexenyl, cyclohexyl, tetrahydropyranyl, bicyclo or tricyclo sugar mimetics e.g. non furanose sugar units.

[0347] “Nucleotide” means a nucleoside having a phosphate group covalently linked to the sugar portion of the nucleoside.

[0348] “Nucleotide mimetic” includes those structures used to replace the nucleoside and the linkage at one or more positions of an oligomeric compound such as for example peptide nucleic acids or morpholinos (morpholinos linked by —N(H)—C(═O)—O— or other non-phosphodiester linkage).

[0349] “Oligomeric compound” or “oligomer” means a polymer of linked monomeric subunits which is capable of hybridizing to at least a region of a nucleic acid molecule.

[0350] “Oligonucleotide” means a polymer of linked nucleosides, wherein each nucleoside and each internucleoside linkage may be modified or unmodified, independent one from another.

[0351] “Parenteral administration” means administration through injection or infusion. Parenteral administration includes subcutaneous administration, intravenous administration, intramuscular administration, intraarterial administration, intraperitoneal administration, or intracranial administration, e.g. intrathecal or intracerebroventricular administration. Administration can be continuous, or chronic, or short or intermittent.

[0352] “Peptide” means a molecule formed by linking at least two amino acids by amide bonds. Peptide refers to polypeptides and proteins.

[0353] “Pharmaceutical composition” means a mixture of substances suitable for administering to an individual. For example, a pharmaceutical composition can comprise one or more active agents and a sterile aqueous solution.

[0354] “Pharmaceutically acceptable salts” means physiologically and pharmaceutically acceptable salts of antisense compounds, i.e., salts that retain the desired biological activity of the parent oligonucleotide and do not impart undesired toxicological effects thereto.

[0355] “Phosphorothioate linkage” means a linkage between nucleosides where the phosphodiester bond is modified by replacing one of the non-bridging oxygen atoms with a sulfur atom. A phosphorothioate linkage is a modified internucleoside linkage.

[0356] “Portion” means a defined number of contiguous (i.e. linked) nucleobases of a nucleic acid. In certain embodiments, a portion is a defined number of contiguous nucleobases of a target nucleic acid. In certain embodiments, a portion is a defined number of contiguous nucleobases of an antisense compound.

[0357] “Preferentially reducing CUG exp DMPK RNA” refers to a preferential reduction of RNA transcripts from a CUGexp DMPK allele relative to RNA transcripts from a normal DMPK allele.

[0358] “Prevent” refers to delaying or forestalling the onset or development of a disease, disorder, or condition for a period of time from minutes to indefinitely. Prevent also means reducing risk of developing a disease, disorder, or condition.

[0359] “Prodrug” means a therapeutic agent that is prepared in an inactive form that is converted to an active form within the body or cells thereof by the action of endogenous enzymes or other chemicals or conditions.

[0360] “Side effects” means physiological responses attributable to a treatment other than the desired effects. In certain embodiments, side effects include injection site reactions, liver function test abnormalities, renal function abnormalities, liver toxicity, renal toxicity, central nervous system abnormalities, myopathies, and malaise. For example, increased aminotransferase levels in serum can indicate liver toxicity or liver function abnormality. For example, increased bilirubin can indicate liver toxicity or liver function abnormality.

[0361] “Single-stranded oligonucleotide” means an oligonucleotide which is not hybridized to a complementary strand.

[0362] “Specifically hybridizable” refers to an antisense compound having a sufficient degree of complementarity between an antisense oligonucleotide and a target nucleic acid to induce a desired effect, while exhibiting minimal or no effects on non-target nucleic acids under conditions in which specific binding is desired, i.e. under physiological conditions in the case of in vivo assays and therapeutic treatments.

[0363] “Spliceopathy” means a change in the alternative splicing of one or more RNAs that leads to the expression of altered splice products in a particular tissue.

[0364] “Subcutaneous administration” means administration just below the skin.

[0365] “Substituted sugar moiety” means a furanosyl other than a natural sugar of RNA or DNA.

[0366] “Sugar” or “Sugar moiety” means a natural sugar moiety or a modified sugar.

[0367] “Sugar surrogate” overlaps with the slightly broader term “nucleoside mimetic” but is intended to indicate replacement of the sugar unit (furanose ring) only A sugar surrogate is capable of replacing the naturally occurring sugar moiety of a nucleoside, such that the resulting nucleoside sub-units are capable of linking together and/or linking to other nucleosides to form an oligomeric compound which is capable of hybridizing to a complementary oligomeric compound. Such structures include rings comprising a different number of atoms than furanosyl (e.g., 4, 6, or 7-membered rings); replacement of the oxygen of a furanosyl with a non-oxygen atom (e.g., carbon, sulfur, or nitrogen); or both a change in the number of atoms and a replacement of the oxygen. Such structures may also comprise substitutions corresponding to those described for substituted sugar moieties (e.g., 6-membered carbocyclic bicyclic sugar surrogates optionally comprising additional substituents). Sugar surrogates also include more complex sugar replacements (e.g., the non-ring systems of peptide nucleic acid). Sugar surrogates include without limitation morpholinos, cyclohexenyls and cyclohexitols.

[0368] “Targeting” or “targeted” means the process of design and selection of an antisense compound that will specifically hybridize to a target nucleic acid and induce a desired effect.

[0369] “Target nucleic acid,” “target RNA,” and “target RNA transcript” all refer to a nucleic acid capable of being targeted by antisense compounds. In certain embodiments, a target nucleic acid comprises a region of a DMPK nucleic acid.

[0370] “Target segment” means the sequence of nucleotides of a target nucleic acid to which an antisense compound is targeted. “5′ target site” refers to the 5′-most nucleotide of a target segment. “3′ target site” refers to the 3′-most nucleotide of a target segment.

[0371] “Therapeutically effective amount” means an amount of an agent that provides a therapeutic benefit to an individual.

[0372] “Treat” refers to administering a pharmaceutical composition to effect an alteration or improvement of a disease, disorder, or condition.

[0373] “Type 1 myotonic dystrophy” or “DM1” means an autosomal dominant disorder caused by expansion of a non-coding CTG repeat in DMPK. This mutation leads to RNA dominance, a process in which expression of RNA containing an expanded CUG repeat (CUGexp) induced cell dysfunction. The CUGexp tract interacts with RNA binding proteins and causes the mutant transcript to be retained in nuclear foci. The toxicity of this RNA stems from sequestration of RNA binding proteins and activation of signaling pathways.

[0374] “Unmodified nucleotide” means a nucleotide composed of naturally occurring nucleobases, sugar moieties, and internucleoside linkages. In certain embodiments, an unmodified nucleotide is an RNA nucleotide (i.e. β-D-ribonucleosides) or a DNA nucleotide (i.e. β-D-deoxyribonucleoside).

### Certain Embodiments

[0375] Certain embodiments provide methods, compounds, and compositions for inhibiting DMPK expression.

[0376] Certain embodiments provide a method of reducing DMPK expression in an animal comprising administering to the animal a compound comprising a modified oligonucleotide targeting DMPK.

[0377] Certain embodiments provide a method of preferentially reducing CUGexp DMPK RNA, reducing myotonia or reducing spliceopathy in an animal comprising administering to the animal a compound comprising a modified oligonucleotide targeted to DMPK, wherein the modified oligonucleotide preferentially reduces CUGexp DMPK RNA, reduces myotonia or reduces spliceopathy in the animal.

[0378] Certain embodiments provide a method of administering an antisense oligonucleotide to counteract RNA dominance by directing the cleavage of pathogenic transcripts.

[0379] Certain embodiments provide a method of reducing spliceopathy of Sercal. In certain embodiments, methods provided herein result in exon 22 inclusion. In certain embodiments, the corrective splicing occurs in the tibialis anterior, gastrocnemius, and quadriceps muscles.

[0380] Certain embodiments provide a method of reducing spliceopathy of m-Titin. In certain embodiments, methods provided herein result in exon 5 inclusion. In certain embodiments, the corrective splicing occurs in the tibialis anterior, gastrocnemius, and quadriceps muscles.

[0381] Certain embodiments provide a method of reducing spliceopathy of Clcn1. In certain embodiments, methods provided herein result in exon 7a inclusion. In certain embodiments, the corrective splicing occurs in the tibialis anterior, gastrocnemius, and quadriceps muscles.

[0382] Certain embodiments provide a method of reducing spliceopathy of Zasp. In certain embodiments, methods provided herein result in exon 11 inclusion. In certain embodiments, the corrective splicing occurs in the tibialis anterior, gastrocnemius, and quadriceps muscles.

[0383] Certain embodiments provide a method for treating an animal with type 1 myotonic dystrophy comprising: a) identifying said animal with type 1 myotonic dystrophy, and b) administering to said animal a therapeutically effective amount of a compound comprising a modified oligonucleotide targeted to DMPK. In certain embodiments, the therapeutically effective amount of the compound administered to the animal preferentially reduces CUGexp DMPK RNA, reduces myotonia or reduces spliceopathy in the animal.

[0384] Certain embodiments provide a method of achieving a preferential reduction of CUGexp DMPK RNA, including administering to the subject suspected of having type 1 myotonic dystrophy or having a CUGexp DMPK RNA a modified antisense oligonucleotide complementary to a non-repeat region of said CUGexp DMPK RNA. The modified antisense oligonucleotide, when bound to said CUGexp DMPK RNA, achieves a preferential reduction of the CUGexp DMPK RNA.

[0385] Certain embodiments provide a method of achieving a preferential reduction of CUGexp DMPK RNA, including selecting a subject having type 1 myotonic dystrophy or having a CUGexp DMPK RNA and administering to said subject a modified antisense oligonucleotide complementary to a non-repeat region of said CUGexp DMPK RNA. The modified antisense oligonucleotide, when bound to the CUGexp DMPK RNA, activates a ribonuclease or nuclear ribonuclease, thereby achieving a preferential reduction of the CUGexp DMPK RNA in the nucleus.

[0386] Certain embodiments provide a method of achieving a preferential reduction of CUGexp DMPK RNA, including selecting a subject having type 1 myotonic dystrophy or having a mutant or CUGexp DMPK RNA and systemically administering to said subject a modified antisense oligonucleotide complementary to a non-repeat region of said CUGexp DMPK RNA. The modified antisense oligonucleotide, when bound to the mutant or CUGexp DMPK RNA, achieves a preferential reduction of the mutant or CUGexp DMPK RNA.

[0387] Certain embodiments provide a method of reducing myotonia in a subject in need thereof. The method includes administering to the subject a modified antisense oligonucleotide complementary to a non-repeat region of a DMPK RNA, wherein the modified antisense oligonucleotide, when bound to the DMPK RNA, activates a ribonuclease or nuclear ribonuclease, thereby reducing myotonia. In certain embodiments, the subject has or is suspected of having type 1 myotonic dystrophy or having a mutant DMPK RNA or CUGexp DMPK RNA. In certain embodiments, the DMPK RNA is nuclear retained.

[0388] Certain embodiments provide a method of reducing spliceopathy in a subject in need thereof. The method includes administering to the subject a modified antisense oligonucleotide complementary to a non-repeat region of a DMPK RNA, wherein the modified antisense oligonucleotide, when bound to the DMPK RNA, activates a ribonuclease or nuclear ribonuclease, thereby reducing spliceopathy. In certain embodiments, the subject has or is suspected of having type 1 myotonic dystrophy or having a nuclear retained CUGexp DMPK RNA. In certain embodiments, the DMPK RNA is nuclear retained. In certain embodiments, the spliceopathy is MBNL dependent spliceopathy.

[0389] In certain embodiments, the modified antisense oligonucleotide of the methods is chimeric. In certain embodiments, the modified antisense oligonucleotide of the methods is a gapmer.

[0390] In certain embodiments of the methods provided herein, the administering is subcutaneous. In certain embodiments, the administering is intravenous.

[0391] In certain embodiments, the modified antisense oligonucleotide of the methods targets a non-coding sequence within the non-repeat region of a DMPK RNA. In certain embodiments, the oligonucleotide targets a coding region, an intron, a 5′UTR, or a 3′UTR of the mutant DMPK RNA.

[0392] In certain embodiments of the methods provided herein, the nuclear ribonuclease is RNase H1.

[0393] In certain embodiments of the methods, the DMPK RNA is reduced in muscle tissue. In certain embodiments, the mutant DMPK RNA CUGexp DMPK RNA is preferentially reduced.

[0394] In certain embodiments, the DMPK has the sequence as set forth in GenBank Accession No. NM_001081560.1 (incorporated herein as SEQ ID NO: 1). In certain embodiments, the DMPK has the sequence as set forth in GenBank Accession No. NT_011109.15 truncated from nucleotides 18540696 to 18555106 (incorporated herein as SEQ ID NO: 2). In certain embodiments, the DMPK has the sequence as set forth in GenBank Accession No. NT_039413.7 truncated from nucleotides 16666001 to 16681000 (incorporated herein as SEQ ID NO: 3). In certain embodiments, the DMPK has the sequence as set forth in GenBank Accession No. NM_032418.1 (incorporated herein as SEQ ID NO: 4). In certain embodiments, the DMPK has the sequence as set forth in GenBank Accession No. AI007148.1 (incorporated herein as SEQ ID NO: 5). In certain embodiments, the DMPK has the sequence as set forth in GenBank Accession No. AI304033.1 (incorporated herein as SEQ ID NO: 6). In certain embodiments, the DMPK has the sequence as set forth in GenBank Accession No. BC024150.1 (incorporated herein as SEQ ID NO: 7). In certain embodiments, the DMPK has the sequence as set forth in GenBank Accession No. BC056615.1 (incorporated herein as SEQ ID NO: 8). In certain embodiments, the DMPK has the sequence as set forth in GenBank Accession No. BC075715.1 (incorporated herein as SEQ ID NO: 9). In certain embodiments, the DMPK has the sequence as set forth in GenBank Accession No. BU519245.1 (incorporated herein as SEQ ID NO: 10). In certain embodiments, the DMPK has the sequence as set forth in GenBank Accession No. CB247909.1 (incorporated herein as SEQ ID NO: 11). In certain embodiments, the DMPK has the sequence as set forth in GenBank Accession No. CX208906.1 (incorporated herein as SEQ ID NO: 12). In certain embodiments, the DMPK has the sequence as set forth in GenBank Accession No. CX732022.1 (incorporated herein as SEQ ID NO: 13). In certain embodiments, the DMPK has the sequence as set forth in GenBank Accession No. S60315.1 (incorporated herein as SEQ ID NO: 14). In certain embodiments, the DMPK has the sequence as set forth in GenBank Accession No. S60316.1 (incorporated herein as SEQ ID NO: 15). In certain embodiments, the DMPK has the sequence as set forth in GenBank Accession No. NM_001081562.1 (incorporated herein as SEQ ID NO: 16). In certain embodiments, the DMPK has the sequence as set forth in GenBank Accession No. NM_001100.3 (incorporated herein as SEQ ID NO: 17).

[0395] In certain embodiments, the modified oligonucleotide has a nucleobase sequence comprising at least 8 contiguous nucleobases of a nucleobase sequence recited in any one of SEQ ID NOs: 23, 24, 25, 26, 27, 28, 29, 30, 31, 32, or 33-874. In certain embodiments, the modified oligonucleotide has a nucleobase sequence comprising at least 9, at least 10, or at least 11, contiguous nucleobases of a nucleobase sequence recited in any one of SEQ ID NOs: 23, 24, 25, 26, 27, 28, 29, 30, 31, 32, or 33-874.

[0396] In certain embodiments, the modified oligonucleotide has a nucleobase sequence comprising at least 12 contiguous nucleobases of a nucleobase sequence recited in any one of SEQ ID NOs: 23, 24, 25, 26, 27, 28, 29, 30, 31, 32, or 33-874. In certain embodiments, the modified oligonucleotide has a nucleobase sequence comprising at least 13, or at least 14, contiguous nucleobases of a nucleobase sequence recited in any one of SEQ ID NOs: 23, 24, 25, 26, 27, 28, 29, 30, 31, 32, or 33-874.

[0397] In certain embodiments, the modified oligonucleotide has a nucleobase sequence comprising at least 15 contiguous nucleobases of a nucleobase sequence recited in any one of SEQ ID NOs: 23, 24, 25, 26, 27, 28, 29, 30, 31, 32, or 33-874. In certain embodiments, the modified oligonucleotide has a nucleobase sequence comprising at least 16 contiguous nucleobases of a nucleobase sequence recited in any one of SEQ ID NOs: 23, 24, 25, 26, 27, 28, 29, 30, 31, 32, or 33-874.

[0398] In certain embodiments, the modified oligonucleotide has a nucleobase sequence comprising at least 17 contiguous nucleobases of a nucleobase sequence recited in any one of SEQ ID NOs: 24, 25, 27, or 28.

[0399] In certain embodiments, the modified oligonucleotide has a nucleobase sequence comprising at least 18 contiguous nucleobases of a nucleobase sequence recited in any one of SEQ ID NOs: 24 or 25. In certain embodiments, the modified oligonucleotide has a nucleobase sequence comprising at least 19 contiguous nucleobases of a nucleobase sequence recited in any one of SEQ ID NOs: 24 or 25.

[0400] In certain embodiments, the modified oligonucleotides provided herein are targeted to any one of the following regions of SEQ ID NO: 1: 1343-1368, 1317-1366, 2748-2791, 2155-2208, 2748-2791, 730-748, 528-547, 531-567, 636-697, 1311-1331, 1314-1339, 1446-1475, 1635-1670, 1610-1638, 1457-1486, 2773-1788, 931-948, 934-949, 937-952, 942-957, 937-957, 943-958, 937-953, 1346-1363, 1346-1361, 1347-1363, 2162-2179, 2492-2508, 2696-2717, and 2683-2703. In certain embodiments, the modified oligonucleotides provided herein are targeted to any one of the following regions of SEQ ID NO: 1: 2773-2788, 1343-1358, and 1344-1359.

[0401] In certain embodiments, the modified oligonucleotides provided herein have a nucleobase sequence comprising a complementary region comprising at least 8 contiguous nucleobases complementary to a target region. In certain embodiments, the modified oligonucleotides provided herein have a nucleobase sequence comprising a complementary region comprising at least 8 contiguous nucleobases complementary to a target region, wherein the target region is targeted to nucleobases 1343-1368, 1317-1366, 2748-2791, 2155-2208, 2748-2791, 730-748, 528-547, 531-567, 636-697, 1311-1331, 1314-1339, 1446-1475, 1635-1670, 1610-1638, 1457-1486, 2773-1788, 931-948, 934-949, 937-952, 942-957, 937-957, 943-958, 937-953, 1346-1363, 1346-1361, 1347-1363, 2162-2179, 2492-2508, 2696-2717, or 2683-2703 of SEQ ID NO: 1. In certain embodiments, the modified oligonucleotides provided herein have a nucleobase sequence comprising a complementary region comprising at least 8 contiguous nucleobases complementary to a target region, wherein the target region is targeted to nucleobases 2773-2788, 1343-1358, or 1344-1359 of SEQ ID NO: 1.

[0402] In certain embodiments, the modified oligonucleotides provided herein have a nucleobase sequence comprising a complementary region comprising at least 10 contiguous nucleobases complementary to a target region. In certain embodiments, the modified oligonucleotides provided herein have a nucleobase sequence comprising a complementary region comprising at least 10 contiguous nucleobases complementary to a target region, wherein the target region is targeted to nucleobases 1343-1368, 1317-1366, 2748-2791, 2155-2208, 2748-2791, 730-748, 528-547, 531-567, 636-697, 1311-1331, 1314-1339, 1446-1475, 1635-1670, 1610-1638, 1457-1486, 2773-1788, 931-948, 934-949, 937-952, 942-957, 937-957, 943-958, 937-953, 1346-1363, 1346-1361, 1347-1363, 2162-2179, 2492-2508, 2696-2717, or 2683-2703 of SEQ ID NO: 1. In certain embodiments, the modified oligonucleotides provided herein have a nucleobase sequence comprising a complementary region comprising at least 10 contiguous nucleobases complementary to a target region, wherein the target region is targeted to nucleobases 2773-2788, 1343-1358, or 1344-1359 of SEQ ID NO: 1.

[0403] In certain embodiments, the modified oligonucleotides provided herein have a nucleobase sequence comprising a complementary region comprising at least 12 contiguous nucleobases complementary to a target region. In certain embodiments, the modified oligonucleotides provided herein have a nucleobase sequence comprising a complementary region comprising at least 12 contiguous nucleobases complementary to a target region, wherein the target region is targeted to nucleobases 1343-1368, 1317-1366, 2748-2791, 2155-2208, 2748-2791, 730-748, 528-547, 531-567, 636-697, 1311-1331, 1314-1339, 1446-1475, 1635-1670, 1610-1638, 1457-1486, 2773-1788, 931-948, 934-949, 937-952, 942-957, 937-957, 943-958, 937-953, 1346-1363, 1346-1361, 1347-1363, 2162-2179, 2492-2508, 2696-2717, or 2683-2703 of SEQ ID NO: 1. In certain embodiments, the modified oligonucleotides provided herein have a nucleobase sequence comprising a complementary region comprising at least 12 contiguous nucleobases complementary to a target region, wherein the target region is targeted to nucleobases 2773-2788, 1343-1358, or 1344-1359 of SEQ ID NO: 1.

[0404] In certain embodiments, the modified oligonucleotides provided herein have a nucleobase sequence comprising a complementary region comprising at least 14 contiguous nucleobases complementary to a target region. In certain embodiments, the modified oligonucleotides provided herein have a nucleobase sequence comprising a complementary region comprising at least 14 contiguous nucleobases complementary to a target region, wherein the target region is targeted to nucleobases 1343-1368, 1317-1366, 2748-2791, 2155-2208, 2748-2791, 730-748, 528-547, 531-567, 636-697, 1311-1331, 1314-1339, 1446-1475, 1635-1670, 1610-1638, 1457-1486, 2773-1788, 931-948, 934-949, 937-952, 942-957, 937-957, 943-958, 937-953, 1346-1363, 1346-1361, 1347-1363, 2162-2179, 2492-2508, 2696-2717, or 2683-2703 of SEQ ID NO: 1. In certain embodiments, the modified oligonucleotides provided herein have a nucleobase sequence comprising a complementary region comprising at least 14 contiguous nucleobases complementary to a target region, wherein the target region is targeted to nucleobases 2773-2788, 1343-1358, or 1344-1359 of SEQ ID NO: 1.

[0405] In certain embodiments, the modified oligonucleotides provided herein have a nucleobase sequence comprising a complementary region comprising at least 16 contiguous nucleobases complementary to a target region. In certain embodiments, the modified oligonucleotides provided herein have a nucleobase sequence comprising a complementary region comprising at least 16 contiguous nucleobases complementary to a target region, wherein the target region is targeted to nucleobases 1343-1368, 1317-1366, 2748-2791, 2155-2208, 2748-2791, 730-748, 528-547, 531-567, 636-697, 1311-1331, 1314-1339, 1446-1475, 1635-1670, 1610-1638, 1457-1486, 2773-1788, 931-948, 934-949, 937-952, 942-957, 937-957, 943-958, 937-953, 1346-1363, 1346-1361, 1347-1363, 2162-2179, 2492-2508, 2696-2717, or 2683-2703 of SEQ ID NO: 1. In certain embodiments, the modified oligonucleotides provided herein have a nucleobase sequence comprising a complementary region comprising at least 16 contiguous nucleobases complementary to a target region, wherein the target region is targeted to nucleobases 2773-2788, 1343-1358, or 1344-1359 of SEQ ID NO: 1.

[0406] In certain embodiments, the modified oligonucleotides provided herein are targeted to any one of the following regions of SEQ ID NO: 2: 10195-10294, 13553-13572, 13748-13767, 13455-13475, 13628-13657, 13735-13760, 13746-13905, 13836-13851, 13553-13568, 13563-13578, 13624-13639, 13686-13701, 13760-13775, 13763-13779, 13765-13780, 2580-2595, 6446-6461, 11099-11115, 11082-11099, 1974-1993, 4435-4456, 6035-6052, 6360-6385, 6445-6468, 6807-6824, 6789-6806, and 6596-6615. In certain embodiments, the modified oligonucleotides provided herein are targeted to any one of the following regions of SEQ ID NO: 2: 13836-13831, 8603-8618, and 8604-8619.

[0407] In certain embodiments, the modified oligonucleotides provided herein have a nucleobase sequence comprising a complementary region comprising at least 8 contiguous nucleobases complementary to a target region. In certain embodiments, the modified oligonucleotides provided herein have a nucleobase sequence comprising a complementary region comprising at least 8 contiguous nucleobases complementary to a target region, wherein the target region is targeted to nucleobases 10195-10294, 13553-13572, 13748-13767, 13455-13475, 13628-13657, 13735-13760, 13746-13905, 13836-13851, 13553-13568, 13563-13578, 13624-13639, 13686-13701, 13760-13775, 13763-13779, 13765-13780, 2580-2595, 6446-6461, 11099-11115, 11082-11099, 1974-1993, 4435-4456, 6035-6052, 6360-6385, 6445-6468, 6807-6824, 6789-6806, or 6596-6615 of SEQ ID NO: 2. In certain embodiments, the modified oligonucleotides provided herein have a nucleobase sequence comprising a complementary region comprising at least 8 contiguous nucleobases complementary to a target region, wherein the target region is targeted to nucleobases 13836-13831, 8603-8618, or 8604-8619 of SEQ ID NO: 2.

[0408] In certain embodiments, the modified oligonucleotides provided herein have a nucleobase sequence comprising a complementary region comprising at least 10 contiguous nucleobases complementary to a target region. In certain embodiments, the modified oligonucleotides provided herein have a nucleobase sequence comprising a complementary region comprising at least 10 contiguous nucleobases complementary to a target region, wherein the target region is targeted to nucleobases 10195-10294, 13553-13572, 13748-13767, 13455-13475, 13628-13657, 13735-13760, 13746-13905, 13836-13851, 13553-13568, 13563-13578, 13624-13639, 13686-13701, 13760-13775, 13763-13779, 13765-13780, 2580-2595, 6446-6461, 11099-11115, 11082-11099, 1974-1993, 4435-4456, 6035-6052, 6360-6385, 6445-6468, 6807-6824, 6789-6806, or 6596-6615 of SEQ ID NO: 2. In certain embodiments, the modified oligonucleotides provided herein have a nucleobase sequence comprising a complementary region comprising at least 10 contiguous nucleobases complementary to a target region, wherein the target region is targeted to nucleobases 13836-13831, 8603-8618, or 8604-8619 of SEQ ID NO: 2.

[0409] In certain embodiments, the modified oligonucleotides provided herein have a nucleobase sequence comprising a complementary region comprising at least 12 contiguous nucleobases complementary to a target region. In certain embodiments, the modified oligonucleotides provided herein have a nucleobase sequence comprising a complementary region comprising at least 12 contiguous nucleobases complementary to a target region, wherein the target region is targeted to nucleobases 10195-10294, 13553-13572, 13748-13767, 13455-13475, 13628-13657, 13735-13760, 13746-13905, 13836-13851, 13553-13568, 13563-13578, 13624-13639, 13686-13701, 13760-13775, 13763-13779, 13765-13780, 2580-2595, 6446-6461, 11099-11115, 11082-11099, 1974-1993, 4435-4456, 6035-6052, 6360-6385, 6445-6468, 6807-6824, 6789-6806, or 6596-6615 of SEQ ID NO: 2. In certain embodiments, the modified oligonucleotides provided herein have a nucleobase sequence comprising a complementary region comprising at least 12 contiguous nucleobases complementary to a target region, wherein the target region is targeted to nucleobases 13836-13831, 8603-8618, or 8604-8619 of SEQ ID NO: 2.

[0410] In certain embodiments, the modified oligonucleotides provided herein have a nucleobase sequence comprising a complementary region comprising at least 14 contiguous nucleobases complementary to a target region. In certain embodiments, the modified oligonucleotides provided herein have a nucleobase sequence comprising a complementary region comprising at least 14 contiguous nucleobases complementary to a target region, wherein the target region is targeted to nucleobases 10195-10294, 13553-13572, 13748-13767, 13455-13475, 13628-13657, 13735-13760, 13746-13905, 13836-13851, 13553-13568, 13563-13578, 13624-13639, 13686-13701, 13760-13775, 13763-13779, 13765-13780, 2580-2595, 6446-6461, 11099-11115, 11082-11099, 1974-1993, 4435-4456, 6035-6052, 6360-6385, 6445-6468, 6807-6824, 6789-6806, or 6596-6615 of SEQ ID NO: 2. In certain embodiments, the modified oligonucleotides provided herein have a nucleobase sequence comprising a complementary region comprising at least 14 contiguous nucleobases complementary to a target region, wherein the target region is targeted to nucleobases 13836-13831, 8603-8618, or 8604-8619 of SEQ ID NO: 2.

[0411] In certain embodiments, the modified oligonucleotides provided herein have a nucleobase sequence comprising a complementary region comprising at least 16 contiguous nucleobases complementary to a target region. In certain embodiments, the modified oligonucleotides provided herein have a nucleobase sequence comprising a complementary region comprising at least 16 contiguous nucleobases complementary to a target region, wherein the target region is targeted to nucleobases 10195-10294, 13553-13572, 13748-13767, 13455-13475, 13628-13657, 13735-13760, 13746-13905, 13836-13851, 13553-13568, 13563-13578, 13624-13639, 13686-13701, 13760-13775, 13763-13779, 13765-13780, 2580-2595, 6446-6461, 11099-11115, 11082-11099, 1974-1993, 4435-4456, 6035-6052, 6360-6385, 6445-6468, 6807-6824, 6789-6806, or 6596-6615 of SEQ ID NO: 2. In certain embodiments, the modified oligonucleotides provided herein have a nucleobase sequence comprising a complementary region comprising at least 16 contiguous nucleobases complementary to a target region, wherein the target region is targeted to nucleobases 13836-13831, 8603-8618, or 8604-8619 of SEQ ID NO: 2.

[0412] In certain embodiments, the animal is a human.

[0413] In certain embodiments, the compounds or compositions of the invention are designated as a first agent and the methods of the invention further comprise administering a second agent. In certain embodiments, the first agent and the second agent are co-administered. In certain embodiments the first agent and the second agent are co-administered sequentially or concomitantly.

[0414] In certain embodiments, administration comprises parenteral administration.

[0415] In certain embodiments, the compound is a single-stranded modified oligonucleotide. In certain embodiments, the nucleobase sequence of the modified oligonucleotide is at least 95% complementary to any one of SEQ ID NOs: 1-19 as measured over the entirety of said modified oligonucleotide. In certain embodiments, the nucleobase sequence of the modified oligonucleotide is 100% complementary to any one of SEQ ID NOs: 1-19 as measured over the entirety of said modified oligonucleotide. In certain embodiments, the compound is a single-stranded modified oligonucleotide. In certain embodiments, the nucleobase sequence of the modified oligonucleotide is at least 95% complementary to any one of SEQ ID NO: 1 as measured over the entirety of said modified oligonucleotide. In certain embodiments, the nucleobase sequence of the modified oligonucleotide is 100% complementary to any one of SEQ ID NO: 1 as measured over the entirety of said modified oligonucleotide.

[0416] In certain embodiments, the nucleobase sequence of the modified oligonucleotide is at least 90% complementary to any one of SEQ ID NO: 1 as measured over the entirety of said modified oligonucleotide. In certain embodiments, the nucleobase sequence of the modified oligonucleotide is 85% complementary to any one of SEQ ID NOs: 1 as measured over the entirety of said modified oligonucleotide.

[0417] In certain embodiments, the nucleobase sequence of the modified oligonucleotide is at least 90% complementary to any one of SEQ ID NO: 2 as measured over the entirety of said modified oligonucleotide. In certain embodiments, the nucleobase sequence of the modified oligonucleotide is 85% complementary to any one of SEQ ID NO: 2 as measured over the entirety of said modified oligonucleotide.

[0418] In certain embodiments, at least one internucleoside linkage of said modified oligonucleotide is a modified internucleoside linkage. In certain embodiments, each internucleoside linkage is a phosphorothioate internucleoside linkage.

[0419] In certain embodiments, at least one nucleoside of said modified oligonucleotide comprises a modified sugar. In certain embodiments, at least one modified sugar is a bicyclic sugar. In certain embodiments, at least one modified sugar comprises a 2′-O-methoxyethyl or a 4′-(CH₂)ₙ—O-2′ bridge, wherein n is 1 or 2.

[0420] In certain embodiments, at least one nucleoside of said modified oligonucleotide comprises a modified nucleobase. In certain embodiments, the modified nucleobase is a 5-methylcytosine.

[0421] In certain embodiments, the modified oligonucleotide comprises: a) a gap segment consisting of linked deoxynucleosides; b) a 5′ wing segment consisting of linked nucleosides; and c) a 3′ wing segment consisting of linked nucleosides. The gap segment is positioned between the 5′ wing segment and the 3′ wing segment and each nucleoside of each wing segment comprises a modified sugar.

[0422] In certain embodiments, the modified oligonucleotide comprises: a) a gap segment consisting of ten linked deoxynucleosides; b) a 5′ wing segment consisting of five linked nucleosides; and c) a 3′ wing segment consisting of five linked nucleosides. The gap segment is positioned between the 5′ wing segment and the 3′ wing segment, each nucleoside of each wing segment comprises a 2′-O-methoxyethyl sugar, each internucleoside linkage of said modified oligonucleotide is a phosphorothioate linkage, and each cytosine in said modified oligonucleotide is a 5′-methylcytosine.

[0423] In certain embodiments, the modified oligonucleotide consists of 20 linked nucleosides. In certain embodiments, the modified oligonucleotide consists of 19 linked nucleosides. In certain embodiments, the modified oligonucleotide consists of 18 linked nucleosides. In certain embodiments, the modified oligonucleotide consists of 17 linked nucleosides. In certain embodiments, the modified oligonucleotide consists of 16 linked nucleosides.

[0424] Certain embodiments provide a method of preferentially reducing CUGexp DMPK RNA, reducing myotonia or reducing spliceopathy in an animal comprising administering to the animal a compound comprising a modified oligonucleotide having a gap segment consisting of ten linked deoxynucleosides, a 5′ wing segment consisting of five linked nucleosides and a 3′ wing segment consisting of five linked nucleosides. The gap segment is positioned between the 5′ wing segment and the 3′ wing segment, each nucleoside of each wing segment comprises a 2′-O-methoxyethyl sugar, each internucleoside linkage of said modified oligonucleotide is a phosphorothioate linkage, each cytosine in said modified oligonucleotide is a 5′-methylcytosine.

[0425] In certain embodiments, the modified oligonucleotide comprises: a) a gap segment consisting of eight linked deoxynucleosides; b) a 5′ wing segment consisting of four linked nucleosides and having a E-E-K-K 5′-wing motif, c) a 3′ wing segment consisting of four linked nucleosides and having a K-K-E-E 3′-wing motif, and d) wherein the gap segment is positioned between the 5′ wing segment and the 3′ wing segment, and wherein each E represents 2′-O-methoxyethyl sugar and each K represents a cEt sugar.

[0426] In certain embodiments, the modified oligonucleotide comprises: a) a gap segment consisting of seven linked deoxynucleosides; b) a 5′ wing segment consisting of five linked nucleosides and having an E-E-E-K-K 5′-wing motif, c) a 3′ wing segment consisting of five linked nucleosides and having a K-K-E-E-E 3′-wing motif, and d) wherein the gap segment is positioned between the 5′ wing segment and the 3′ wing segment, and wherein each E represents 2′-O-methoxyethyl sugar and each K represents a cEt sugar.

[0427] In certain embodiments, the modified oligonucleotide comprises: a) a gap segment consisting of ten linked deoxynucleosides; b) a 5′ wing segment consisting of five linked nucleosides; c) a 3′ wing segment consisting of five linked nucleosides; and d) wherein the gap segment is positioned between the 5′ wing segment and the 3′ wing segment, and wherein each nucleoside of each wing segment comprises a 2′-O-methoxyethyl sugar.

[0428] In certain embodiments, the modified oligonucleotide comprises: a) a gap segment consisting of ten linked deoxynucleosides; b) a 5′ wing segment consisting of three linked nucleosides; c) a 3′ wing segment consisting of three linked nucleosides; and d) wherein the gap segment is positioned between the 5′ wing segment and the 3′ wing segment, and wherein each nucleoside of each wing segment comprises a cEt sugar.

[0429] Certain embodiments provide a method of preferentially reducing CUGexp DMPK RNA, reducing myotonia or reducing spliceopathy in an animal comprising administering to the animal a compound comprising a modified oligonucleotide having: a) a gap segment consisting of eight linked deoxynucleosides; b) a 5′ wing segment consisting of four linked nucleosides and having a E-E-K-K 5′-wing motif, c) a 3′ wing segment consisting of four linked nucleosides and having a K-K-E-E 3′-wing motif, and d) wherein the gap segment is positioned between the 5′ wing segment and the 3′ wing segment, and wherein each E represents 2′-O-methoxyethyl sugar and each K represents a cEt sugar.

[0430] Certain embodiments provide a method of preferentially reducing CUGexp DMPK RNA, reducing myotonia or reducing spliceopathy in an animal comprising administering to the animal a compound comprising a modified oligonucleotide having: a) a gap segment consisting of seven linked deoxynucleosides; b) a 5′ wing segment consisting of five linked nucleosides and having an E-E-E-K-K 5′-wing motif, c) a 3′ wing segment consisting of five linked nucleosides and having a K-K-E-E-E 3′-wing motif, and d) wherein the gap segment is positioned between the 5′ wing segment and the 3′ wing segment, and wherein each E represents 2′-O-methoxyethyl sugar and each K represents a cEt sugar.

[0431] Certain embodiments provide a method of preferentially reducing CUGexp DMPK RNA, reducing myotonia or reducing spliceopathy in an animal comprising administering to the animal a compound comprising a modified oligonucleotide having: a) a gap segment consisting of ten linked deoxynucleosides; b) a 5′ wing segment consisting of five linked nucleosides; c) a 3′ wing segment consisting of five linked nucleosides; and d) wherein the gap segment is positioned between the 5′ wing segment and the 3′ wing segment, and wherein each nucleoside of each wing segment comprises a 2′-O-methoxyethyl sugar.

[0432] Certain embodiments provide a method of preferentially reducing CUGexp DMPK RNA, reducing myotonia or reducing spliceopathy in an animal comprising administering to the animal a compound comprising a modified oligonucleotide having: a) a gap segment consisting of ten linked deoxynucleosides; b) a 5′ wing segment consisting of three linked nucleosides; c) a 3′ wing segment consisting of three linked nucleosides; and d) wherein the gap segment is positioned between the 5′ wing segment and the 3′ wing segment, and wherein each nucleoside of each wing segment comprises a cEt sugar.

[0433] Certain embodiments provide the use of any compound as described herein in the manufacture of a medicament for use in any of the therapeutic methods described herein. For example, certain embodiments provide the use of a compound as described herein in the manufacture of a medicament for treating, ameliorating, or preventing type 1 myotonic dystrophy. Certain embodiments provide the use of a compound as described herein in the manufacture of a medicament for inhibiting expression of DMPK and treating, preventing, delaying or ameliorating a DMPK related disease and or a symptom thereof. Certain embodiments provide the use of a compound as described herein in the manufacture of a medicament for reducing DMPK expression in an animal. Certain embodiments provide the use of a compound as described herein in the manufacture of a medicament for preferentially reducing CUGexp DMPK, reducing myotonia, or reducing spliceopathy in an animal. Certain embodiments provide the use of a compound as described herein in the manufacture of a medicament for treating an animal with type 1 myotonic dystrophy. Certain embodiments provide the use of a compound as described herein in the manufacture of a medicament for treating, preventing, delaying, or ameliorating symptoms and outcomes associated with development of DM1 including muscle stiffness, myotonia, disabling distal weakness, weakness in face and jaw muscles, difficulty in swallowing, drooping of the eyelids (ptosis), weakness of neck muscles, weakness in arm and leg muscles, persistent muscle pain, hypersomnia, muscle wasting, dysphagia, respiratory insufficiency, irregular heartbeat, heart muscle damage, apathy, insulin resistance, and cataracts. Certain embodiments provide the use of a compound as described herein in the manufacture of a medicament for counteracting RNA dominance by directing the cleavage of pathogenic transcripts.

[0434] Certain embodiments provide a kit for treating, preventing, or ameliorating type 1 myotonic dystrophy as described herein wherein the kit comprises: a) a compound as described herein; and optionally b) an additional agent or therapy as described herein. The kit can further include instructions or a label for using the kit to treat, prevent, or ameliorate type 1 myotonic dystrophy.

[0435] Certain embodiments provide any compound or composition as described herein, for use in any of the therapeutic methods described herein. For example, certain embodiments provide a compound or composition as described herein for inhibiting expression of DMPK and treating, preventing, delaying or ameliorating a DMPK related disease and or a symptom thereof. Certain embodiments provide a compound or composition as described herein for use in reducing DMPK expression in an animal. Certain embodiments provide a compound or composition as described herein for use in preferentially reducing CUGexp DMPK, reducing myotonia, or reducing spliceopathy in an animal. Certain embodiments provide a compound or composition as described herein for use in treating an animal with type 1 myotonic dystrophy. Certain embodiments provide a compound or composition as described herein for use in treating, preventing, delaying, or ameliorating symptoms and outcomes associated with development of DM1 including muscle stiffness, myotonia, disabling distal weakness, weakness in face and jaw muscles, difficulty in swallowing, drooping of the eyelids (ptosis), weakness of neck muscles, weakness in arm and leg muscles, persistent muscle pain, hypersomnia, muscle wasting, dysphagia, respiratory insufficiency, irregular heartbeat, heart muscle damage, apathy, insulin resistance, and cataracts. Certain embodiments provide a compound or composition as described herein for use in counteracting RNA dominance by directing the cleavage of pathogenic transcripts. Certain embodiments provide compounds comprising a modified oligonucleotide consisting of 12 to 30 linked nucleosides having a nucleobase sequence comprising at least 12 contiguous nucleobases of any of the nucleobase sequences of SEQ ID NOs: 23, 24, 25, 26, 27, 28, 29, 30, 31, 32, or 33-874.

[0436] Other compounds which can be used in the methods described herein are also provided.

[0437] For example, certain embodiments provide compounds comprising a modified oligonucleotide consisting of 10 to 80, 12 to 50, 12 to 30, 15 to 30, 18 to 24, 19 to 22, or 20 linked nucleosides having a nucleobase sequence comprising at least 8, at least 9, at least 10, at least 11, at least 12, at least 13, at least 14, at least 15, at least 16, at least 17, at least 18, or at least 19, contiguous nucleobases of any of the nucleobase sequences of SEQ ID NOs: 23, 24, 25, 26, 27, 28, 29, 30, 31, 32, or 33-874.

[0438] Certain embodiments provide compounds comprising a modified oligonucleotide consisting of 10 to 80, 12 to 50, 12 to 30, 15 to 30, 18 to 24, 19 to 22, or 20, linked nucleosides having a nucleobase sequence comprising at least 8, at least 9, at least 10, at least 11, at least 12, at least 13, at least 14, at least 15, at least 16, at least 17, at least 18, at least 19, contiguous nucleobases of any of the nucleobase sequences of SEQ ID NOs: 23, 24, 25, 26, 27, 28, 29, 30, 31, 32, or 33-874.

[0439] Certain embodiments provide compounds comprising a modified oligonucleotide consisting of 10 to 80, 12 to 50, 12 to 30, 15 to 30, or 15 to 17, linked nucleosides having a nucleobase sequence comprising a portion of at least 8, at least 9, at least 10, at least 11, at least 12, at least 13, at least 14, at least 15, at least 16, at least 17, at least 18, or at least 19, or more, contiguous nucleobases complementary to an equal length portion of nucleobases 1343-1368, 1317-1366, 2748-2791, 2155-2208, 2748-2791, 730-748, 528-547, 531-567, 636-697, 1311-1331, 1314-1339, 1446-1475, 1635-1670, 1610-1638, 1457-1486, 2773-1788, 931-948, 934-949, 937-952, 942-957, 937-957, 943-958, 937-953, 1346-1363, 1346-1361, 1347-1363, 2162-2179, 2492-2508, 2696-2717, or 2683-2703 of SEQ ID NO: 1.

[0440] Certain embodiments provide compounds comprising a modified oligonucleotide consisting of 10 to 80, 12 to 50, 12 to 30, 15 to 30, 18 to 24, 19 to 22, or 20, linked nucleosides having a nucleobase sequence comprising a portion of at least 8, at least 9, at least 10, at least 11, at least 12, at least 13, at least 14, at least 15, at least 16, at least 17, at least 18, or at least 19, or more, contiguous nucleobases complementary to an equal length portion of nucleobases 10195-10294, 13553-13572, 13748-13767, 13455-13475, 13628-13657, 13735-13760, 13746-13905, 13836-13851, 13553-13568, 13563-13578, 13624-13639, 13686-13701, 13760-13775, 13763-13779, 13765-13780, 2580-2595, 6446-6461, 11099-11115, 11082-11099, 1974-1993, 4435-4456, 6035-6052, 6360-6385, 6445-6468, 6807-6824, 6789-6806, or 6596-6615 of SEQ ID NO: 2.

[0441] In certain embodiments, the modified oligonucleotide is a single-stranded oligonucleotide.

[0442] In certain embodiments, the nucleobase sequence of the modified oligonucleotide is at least 70%, at least 75%, at least 80%, at least 85%, at least 90%, at least 95%, or 100%, complementary to any of SEQ ID NOs: 23, 24, 25, 26, 27, 28, 29, 30, 31, 32, or 33-874.

[0443] In certain embodiments, at least one internucleoside linkage is a modified internucleoside linkage.

[0444] In certain embodiments, each internucleoside linkage is a phosphorothioate internucleoside linkage.

[0445] In certain embodiments, at least one nucleoside comprises a modified sugar.

[0446] In certain embodiments, at least one modified sugar is a bicyclic sugar.

[0447] In certain embodiments, at least one modified sugar is a cEt.

[0448] In certain embodiments, at least one modified sugar comprises a 2′-O-methoxyethyl.

[0449] In certain embodiments, at least one nucleoside comprises a modified nucleobase.

[0450] In certain embodiments, the modified nucleobase is a 5-methylcytosine. In certain embodiments, each cytosine residue comprises a 5-methylcytosine.

[0451] In certain embodiments, the modified oligonucleotide consists of 16 linked nucleosides.

[0452] In certain embodiments, the modified oligonucleotide consists of 17 linked nucleosides.

[0453] In certain embodiments, the modified oligonucleotide consists of 20 linked nucleosides.

[0454] Antisense Compounds Oligomeric compounds include, but are not limited to, oligonucleotides, oligonucleosides, oligonucleotide analogs, oligonucleotide mimetics, antisense compounds, antisense oligonucleotides, and siRNAs. An oligomeric compound can be “antisense” to a target nucleic acid, meaning that is capable of undergoing hybridization to a target nucleic acid through hydrogen bonding.

[0455] In certain embodiments, an antisense compound has a nucleobase sequence that, when written in the 5′ to 3′ direction, comprises the reverse complement of the target segment of a target nucleic acid to which it is targeted. In certain such embodiments, an antisense oligonucleotide has a nucleobase sequence that, when written in the 5′ to 3′ direction, comprises the reverse complement of the target segment of a target nucleic acid to which it is targeted.

[0456] In certain embodiments, an antisense compound targeted to DMPK as described herein is 10 to 30 nucleotides in length. In other words, the antisense compounds are in some embodiments from 10 to 30 linked nucleobases. In other embodiments, the antisense compound comprises a modified oligonucleotide consisting of 8 to 80, 10 to 80, 12 to 30, 12 to 50, 15 to 30, 15 to 18, 15 to 17, 16 to 16, 18 to 24, 19 to 22, or 20 linked nucleobases. In certain such embodiments, the antisense compound comprises a modified oligonucleotide consisting of 8, 9, 10, 11, 12, 13, 14, 15, 16, 17, 18, 19, 20, 21, 22, 23, 24, 25, 26, 27, 28, 29, 30, 31, 32, 33, 34, 35, 36, 37, 38, 39, 40, 41, 42, 43, 44, 45, 46, 47, 48, 49, 50, 51, 52, 53, 54, 55, 56, 57, 58, 59, 60, 61, 62, 63, 64, 65, 66, 67, 68, 69, 70, 71, 72, 73, 74, 75, 76, 77, 78, 79, or 80 linked nucleobases in length, or a range defined by any two of the above values. In certain embodiments, antisense compounds of any of these lengths contain at least 8, at least 9, at least 10, at least 11, at least 12, at least 13, at least 14, at least 15, at least 16, at least 17, at least 18, or at least 19, contiguous nucleobases of the nucleobase sequence of any of the exemplary antisense compounds described herein (e.g., at least 8 contiguous nucleobases of a nucleobase sequence recited in any one of SEQ ID NOs: 23, 24, 25, 26, 27, 28, 29, 30, 31, 32, or 33-874.

[0457] In certain embodiments, the antisense compound comprises a shortened or truncated modified oligonucleotide. The shortened or truncated modified oligonucleotide can have a single nucleoside deleted from the 5′ end (5′ truncation), or alternatively from the 3′ end (3′ truncation). A shortened or truncated oligonucleotide can have two nucleosides deleted from the 5′ end, or alternatively can have two subunits deleted from the 3′ end. Alternatively, the deleted nucleosides can be dispersed throughout the modified oligonucleotide, for example, in an antisense compound having one nucleoside deleted from the 5′ end and one nucleoside deleted from the 3′ end.

[0458] When a single additional nucleoside is present in a lengthened oligonucleotide, the additional nucleoside can be located at the 5′ or 3′ end of the oligonucleotide. When two or more additional nucleosides are present, the added nucleosides can be adjacent to each other, for example, in an oligonucleotide having two nucleosides added to the 5′ end (5′ addition), or alternatively to the 3′ end (3′ addition), of the oligonucleotide. Alternatively, the added nucleoside can be dispersed throughout the antisense compound, for example, in an oligonucleotide having one nucleoside added to the 5′ end and one subunit added to the 3′ end.

[0459] It is possible to increase or decrease the length of an antisense compound, such as an antisense oligonucleotide, and/or introduce mismatch bases without eliminating activity. For example, in Woolf et al. (Proc. Natl. Acad. Sci. USA 89:7305-7309, 1992), a series of antisense oligonucleotides 13-25 nucleobases in length were tested for their ability to induce cleavage of a target RNA in an oocyte injection model. Antisense oligonucleotides 25 nucleobases in length with 8 or 11 mismatch bases near the ends of the antisense oligonucleotides were able to direct specific cleavage of the target mRNA, albeit to a lesser extent than the antisense oligonucleotides that contained no mismatches. Similarly, target specific cleavage was achieved using 13 nucleobase antisense oligonucleotides, including those with 1 or 3 mismatches.

[0460] Gautschi et al (J. Natl. Cancer Inst. 93:463-471, March 2001) demonstrated the ability of an oligonucleotide having 100% complementarity to the bcl-2 mRNA and having 3 mismatches to the bcl-xL mRNA to reduce the expression of both bcl-2 and bcl-xL in vitro and in vivo. Furthermore, this oligonucleotide demonstrated potent anti-tumor activity in vivo.

[0461] Maher and Dolnick (Nuc. Acid. Res. 16:3341-3358, 1988) tested a series of tandem 14 nucleobase antisense oligonucleotides, and a 28 and 42 nucleobase antisense oligonucleotides comprised of the sequence of two or three of the tandem antisense oligonucleotides, respectively, for their ability to arrest translation of human DHFR in a rabbit reticulocyte assay. Each of the three 14 nucleobase antisense oligonucleotides alone was able to inhibit translation, albeit at a more modest level than the 28 or 42 nucleobase antisense oligonucleotides.

### Target Nucleic Acids, Target Regions and Nucleotide Sequences

[0462] Nucleotide sequences that encode DMPK include, without limitation, the following sequences as set forth in GenBank Accession No. NM_001081560.1 (incorporated herein as SEQ ID NO: 1), GenBank Accession No. NT_011109.15 truncated from nucleotides 18540696 to U.S. Pat. No. 18,555,106 (incorporated herein as SEQ ID NO: 2), GenBank Accession No. NT_039413.7 truncated from nucleotides 16666001 to 16681000 (incorporated herein as SEQ ID NO: 3), GenBank Accession No. NM_032418.1 (incorporated herein as SEQ ID NO: 4), GenBank Accession No. AI007148.1 (incorporated herein as SEQ ID NO: 5), GenBank Accession No. AI304033.1 (incorporated herein as SEQ ID NO: 6), GenBank Accession No. BC024150.1 (incorporated herein as SEQ ID NO: 7), GenBank Accession No. BC056615.1 (incorporated herein as SEQ ID NO: 8), GenBank Accession No. BC075715.1 (incorporated herein as SEQ ID NO: 9), GenBank Accession No. BU519245.1 (incorporated herein as SEQ ID NO: 10), GenBank Accession No. CB247909.1 (incorporated herein as SEQ ID NO: 11), GenBank Accession No. CX208906.1 (incorporated herein as SEQ ID NO: 12), GenBank Accession No. CX732022.1 (incorporated herein as SEQ ID NO: 13), GenBank Accession No. S60315.1 (incorporated herein as SEQ ID NO: 14), GenBank Accession No. S60316.1 (incorporated herein as SEQ ID NO: 15), GenBank Accession No. NM_001081562.1 (incorporated herein as SEQ ID NO: 16), and GenBank Accession No. NM_001100.3 (incorporated herein as SEQ ID NO: 17). It is understood that the sequence set forth in each SEQ ID NO in the Examples contained herein is independent of any modification to a sugar moiety, an internucleoside linkage, or a nucleobase. As such, antisense compounds defined by a SEQ ID NO can comprise, independently, one or more modifications to a sugar moiety, an internucleoside linkage, or a nucleobase. Antisense compounds described by Isis Number (Isis No) indicate a combination of nucleobase sequence and motif.

[0463] In certain embodiments, a target region is a structurally defined region of the target nucleic acid. For example, a target region can encompass a 3′ UTR, a 5′ UTR, an exon, an intron, an exon/intron junction, a coding region, a translation initiation region, translation termination region, or other defined nucleic acid region. The structurally defined regions for DMPK can be obtained by accession number from sequence databases such as NCBI and such information is incorporated herein by reference. In certain embodiments, a target region can encompass the sequence from a 5′ target site of one target segment within the target region to a 3′ target site of another target segment within the target region.

[0464] Targeting includes determination of at least one target segment to which an antisense compound hybridizes, such that a desired effect occurs. In certain embodiments, the desired effect is a reduction in mRNA target nucleic acid levels. In certain embodiments, the desired effect is reduction of levels of protein encoded by the target nucleic acid or a phenotypic change associated with the target nucleic acid.

[0465] A target region can contain one or more target segments. Multiple target segments within a target region can be overlapping. Alternatively, they can be non-overlapping. In certain embodiments, target segments within a target region are separated by no more than about 300 nucleotides. In certain embodiments, target segments within a target region are separated by a number of nucleotides that is, is about, is no more than, is no more than about, 250, 200, 150, 100, 90, 80, 70, 60, 50, 40, 30, 20, or 10 nucleotides on the target nucleic acid, or is a range defined by any two of the preceding values. In certain embodiments, target segments within a target region are separated by no more than, or no more than about, 5 nucleotides on the target nucleic acid. In certain embodiments, target segments are contiguous. Contemplated are target regions defined by a range having a starting nucleic acid that is any of the 5′ target sites or 3′ target sites listed herein.

[0466] Suitable target segments can be found within a 5′ UTR, a coding region, a 3′ UTR, an intron, an exon, or an exon/intron junction. Target segments containing a start codon or a stop codon are also suitable target segments. A suitable target segment can specifically exclude a certain structurally defined region such as the start codon or stop codon.

[0467] The determination of suitable target segments can include a comparison of the sequence of a target nucleic acid to other sequences throughout the genome. For example, the BLAST algorithm can be used to identify regions of similarity amongst different nucleic acids. This comparison can prevent the selection of antisense compound sequences that can hybridize in a non-specific manner to sequences other than a selected target nucleic acid (i.e., non-target or off-target sequences).

[0468] There can be variation in activity (e.g., as defined by percent reduction of target nucleic acid levels) of the antisense compounds within an active target region. In certain embodiments, reductions in DMPK mRNA levels are indicative of inhibition of DMPK protein expression. Reductions in levels of a DMPK protein are also indicative of inhibition of target mRNA expression. Further, phenotypic changes, such as a reducing myotonia or reducing spliceopathy, can be indicative of inhibition of DMPK mRNA and/or protein expression.

### Hybridization

[0469] In some embodiments, hybridization occurs between an antisense compound disclosed herein and a DMPK nucleic acid. The most common mechanism of hybridization involves hydrogen bonding (e.g., Watson-Crick, Hoogsteen or reversed Hoogsteen hydrogen bonding) between complementary nucleobases of the nucleic acid molecules.

[0470] Hybridization can occur under varying conditions. Stringent conditions are sequence-dependent and are determined by the nature and composition of the nucleic acid molecules to be hybridized.

[0471] Methods of determining whether a sequence is specifically hybridizable to a target nucleic acid are well known in the art (Sambrooke and Russell, Molecular Cloning: A Laboratory Manual, 3^{rd} Ed., 2001). In certain embodiments, the antisense compounds provided herein are specifically hybridizable with a DMPK nucleic acid.

### Complementarity

[0472] An antisense compound and a target nucleic acid are complementary to each other when a sufficient number of nucleobases of the antisense compound can hydrogen bond with the corresponding nucleobases of the target nucleic acid, such that a desired effect will occur (e.g., antisense inhibition of a target nucleic acid, such as a DMPK nucleic acid).

[0473] An antisense compound can hybridize over one or more segments of a DMPK nucleic acid such that intervening or adjacent segments are not involved in the hybridization event (e.g., a loop structure, mismatch or hairpin structure).

[0474] In certain embodiments, the antisense compounds provided herein, or a specified portion thereof, are, or are at least, 70%, 80%, 85%, 86%, 87%, 88%, 89%, 90%, 91%, 92%, 93%, 94%, 95%, 96%, 97%, 98%, 99%, or 100% complementary to a DMPK nucleic acid, a target region, target segment, or specified portion thereof. In certain embodiments, the antisense compounds are at least 70%, at least 80%, at least 85%, at least 86%, at least 87%, at least 88%, at least 89%, at least 90%, at least 91%, at least 92%, at least 93%, at least 94%, at least 95%, at least 96%, at least 97%, at least 98%, at least 99%, or 100% complementary to a DMPK nucleic acid, a target region, target segment, or specified portion thereof, and contain at least 8, at least 9, at least 10, at least 11, at least 12, at least 13, at least 14, at least 15, at least 16, at least 17, at least 18, or at least 19, contiguous nucleobases of the nucleobase sequence of any of the exemplary antisense compounds described herein (e.g., at least 8 contiguous nucleobases of a nucleobase sequence recited in any one of SEQ ID NOs: 23, 24, 25, 26, 27, 28, 29, 30, 31, 32, or 33-874). Percent complementarity of an antisense compound with a target nucleic acid can be determined using routine methods, and is measured over the entirety of the antisense compound.

[0475] For example, an antisense compound in which 18 of 20 nucleobases of the antisense compound are complementary to a target region, and would therefore specifically hybridize, would represent 90 percent complementarity. In this example, the remaining noncomplementary nucleobases can be clustered or interspersed with complementary nucleobases and need not be contiguous to each other or to complementary nucleobases. As such, an antisense compound which is 18 nucleobases in length having 4 (four) noncomplementary nucleobases which are flanked by two regions of complete complementarity with the target nucleic acid would have 77.8% overall complementarity with the target nucleic acid and would thus fall within the scope of the present invention. Percent complementarity of an antisense compound with a region of a target nucleic acid can be determined routinely using BLAST programs (basic local alignment search tools) and PowerBLAST programs known in the art (Altschul et al., J. Mol. Biol., 1990, 215, 403 410; Zhang and Madden, Genome Res., 1997, 7, 649 656). Percent homology, sequence identity or complementarity, can be determined by, for example, the Gap program (Wisconsin Sequence Analysis Package, Version 8 for Unix, Genetics Computer Group, University Research Park, Madison Wis.), using default settings, which uses the algorithm of Smith and Waterman (Adv. Appl. Math., 1981, 2, 482 489).

[0476] In certain embodiments, the antisense compounds provided herein, or specified portions thereof, are fully complementary (i.e. 100% complementary) to a target nucleic acid, or specified portion thereof. For example, antisense compound can be fully complementary to a DMPK nucleic acid, or a target region, or a target segment or target sequence thereof. As used herein, “fully complementary” means each nucleobase of an antisense compound is capable of precise base pairing with the corresponding nucleobases of a target nucleic acid. For example, a 20 nucleobase antisense compound is fully complementary to a target sequence that is 400 nucleobases long, so long as there is a corresponding 20 nucleobase portion of the target nucleic acid that is fully complementary to the antisense compound. Fully complementary can also be used in reference to a specified portion of the first and/or the second nucleic acid. For example, a 20 nucleobase portion of a 30 nucleobase antisense compound can be “fully complementary” to a target sequence that is 400 nucleobases long. The 20 nucleobase portion of the 30 nucleobase oligonucleotide is fully complementary to the target sequence if the target sequence has a corresponding 20 nucleobase portion wherein each nucleobase is complementary to the 20 nucleobase portion of the antisense compound. At the same time, the entire 30 nucleobase antisense compound can be fully complementary to the target sequence, depending on whether the remaining 10 nucleobases of the antisense compound are also complementary to the target sequence.

[0477] The location of a non-complementary nucleobase can be at the 5′ end or 3′ end of the antisense compound. Alternatively, the non-complementary nucleobase or nucleobases can be at an internal position of the antisense compound. When two or more non-complementary nucleobases are present, they can be either contiguous (i.e. linked) or non-contiguous. In one embodiment, a non-complementary nucleobase is located in the wing segment of a gapmer antisense oligonucleotide.

[0478] In certain embodiments, antisense compounds that are, or are up to 10, 12, 13, 14, 15, 16, 17, 18, 19, or 20 nucleobases in length comprise no more than 4, no more than 3, no more than 2, or no more than 1 non-complementary nucleobase(s) relative to a target nucleic acid, such as a DMPK nucleic acid, or specified portion thereof.

[0479] In certain embodiments, antisense compounds that are, or are up to 10, 12, 13, 14, 15, 16, 17, 18, 19, 20, 21, 22, 23, 24, 25, 26, 27, 28, 29, or 30 nucleobases in length comprise no more than 6, no more than 5, no more than 4, no more than 3, no more than 2, or no more than 1 non-complementary nucleobase(s) relative to a target nucleic acid, such as a DMPK nucleic acid, or specified portion thereof.

[0480] The antisense compounds provided herein also include those which are complementary to a portion of a target nucleic acid. As used herein, “portion” refers to a defined number of contiguous (i.e. linked) nucleobases within a region or segment of a target nucleic acid. A “portion” can also refer to a defined number of contiguous nucleobases of an antisense compound. In certain embodiments, the antisense compounds, are complementary to at least an 8 nucleobase portion of a target segment. In certain embodiments, the antisense compounds are complementary to at least a 10 nucleobase portion of a target segment. In certain embodiments, the antisense compounds are complementary to at least a 15 nucleobase portion of a target segment. Also contemplated are antisense compounds that are complementary to at least an 8, at least a 9, at least a 10, at least an 11, at least a 12, at least a 13, at least a 14, at least a 15, at least a 16, at least a 17, at least an 18, at least a 19, at least a 20, or more nucleobase portion of a target segment, or a range defined by any two of these values.

### Identity

[0481] The antisense compounds provided herein can also have a defined percent identity to a particular nucleotide sequence, SEQ ID NO, or compound represented by a specific Isis number, or portion thereof. As used herein, an antisense compound is identical to the sequence disclosed herein if it has the same nucleobase pairing ability. For example, a RNA which contains uracil in place of thymidine in a disclosed DNA sequence would be considered identical to the DNA sequence since both uracil and thymidine pair with adenine. Shortened and lengthened versions of the antisense compounds described herein as well as compounds having non-identical bases relative to the antisense compounds provided herein also are contemplated. The non-identical bases can be adjacent to each other or dispersed throughout the antisense compound. Percent identity of an antisense compound is calculated according to the number of bases that have identical base pairing relative to the sequence to which it is being compared.

[0482] In certain embodiments, the antisense compounds, or portions thereof, are at least 70%, at least 75%, at least 80%, at least 85%, at least 90%, at least 95%, at least 96%, at least 97%, at least 98%, at least 99% or 100% identical to one or more of the exemplary antisense compounds or SEQ ID NOs, or a portion thereof, disclosed herein.

### Modifications

[0483] A nucleoside is a base-sugar combination. The nucleobase (also known as base) portion of the nucleoside is normally a heterocyclic base moiety. Nucleotides are nucleosides that further include a phosphate group covalently linked to the sugar portion of the nucleoside. For those nucleosides that include a pentofuranosyl sugar, the phosphate group can be linked to the 2′, 3′ or 5′ hydroxyl moiety of the sugar. Oligonucleotides are formed through the covalent linkage of adjacent nucleosides to one another, to form a linear polymeric oligonucleotide. Within the oligonucleotide structure, the phosphate groups are commonly referred to as forming the internucleoside linkages of the oligonucleotide.

[0484] Modifications to antisense compounds encompass substitutions or changes to internucleoside linkages, sugar moieties, or nucleobases. Modified antisense compounds are often preferred over native forms because of desirable properties such as, for example, enhanced cellular uptake, enhanced affinity for nucleic acid target, increased stability in the presence of nucleases, or increased inhibitory activity.

[0485] Chemically modified nucleosides can also be employed to increase the binding affinity of a shortened or truncated antisense oligonucleotide for its target nucleic acid. Consequently, comparable results can often be obtained with shorter antisense compounds that have such chemically modified nucleosides.

### Modified Internucleoside Linkages

[0486] The naturally occurring internucleoside linkage of RNA and DNA is a 3′ to 5′ phosphodiester linkage. Antisense compounds having one or more modified, i.e. non-naturally occurring, internucleoside linkages are often selected over antisense compounds having naturally occurring internucleoside linkages because of desirable properties such as, for example, enhanced cellular uptake, enhanced affinity for target nucleic acids, and increased stability in the presence of nucleases.

[0487] Oligonucleotides having modified internucleoside linkages include internucleoside linkages that retain a phosphorus atom as well as internucleoside linkages that do not have a phosphorus atom. Representative phosphorus containing internucleoside linkages include, but are not limited to, phosphodiesters, phosphotriesters, methylphosphonates, phosphoramidate, and phosphorothioates. Methods of preparation of phosphorous-containing and non-phosphorous-containing linkages are well known.

[0488] In certain embodiments, antisense compounds targeted to a DMPK nucleic acid comprise one or more modified internucleoside linkages. In certain embodiments, the modified internucleoside linkages are phosphorothioate linkages. In certain embodiments, each internucleoside linkage of an antisense compound is a phosphorothioate internucleoside linkage.

### Modified Sugar Moieties

[0489] Antisense compounds of the invention can optionally contain one or more nucleosides wherein the sugar group has been modified. Such sugar modified nucleosides may impart enhanced nuclease stability, increased binding affinity, or some other beneficial biological property to the antisense compounds. In certain embodiments, nucleosides comprise chemically modified ribofuranose ring moieties. Examples of chemically modified ribofuranose rings include without limitation, addition of substitutent groups (including 5′ and 2′ substituent groups, bridging of non-geminal ring atoms to form bicyclic nucleic acids (BNA), replacement of the ribosyl ring oxygen atom with S, N(R), or C(R₁)(R₂) (R, R₁ and R₂ are each independently H, C₁-C₁₂ alkyl or a protecting group) and combinations thereof. Examples of chemically modified sugars include 2′-F-5′-methyl substituted nucleoside (see PCT International Application WO 2008/101157 Published on Aug. 21, 2008 for other disclosed 5′,2′-bis substituted nucleosides) or replacement of the ribosyl ring oxygen atom with S with further substitution at the 2′-position (see published U.S. Patent Application US2005-0130923, published on Jun. 16, 2005) or alternatively 5′-substitution of a BNA (see PCT International Application WO 2007/134181 Published on Nov. 22, 2007 wherein LNA is substituted with for example a 5′-methyl or a 5′-vinyl group).

[0490] Examples of nucleosides having modified sugar moieties include without limitation nucleosides comprising 5′-vinyl, 5′-methyl (R or S), 4′-S, 2′-F, 2′-OCH₃, 2′-OCH₂CH₃, 2′-OCH₂CH₂F and 2′-O(CH₂)₂OCH₃ substituent groups. The substituent at the 2′ position can also be selected from allyl, amino, azido, thio, O-allyl, O—C₁-C₁₀ alkyl, OCF₃, OCH₂F, O(CH₂)₂SCH₃, O(CH₂)₂—O—N(Rₘ)(Rₙ), O—CH₂—C(═O)—N(Rₘ)(Rₙ), and O—CH₂—C(═O)—N(Rₗ)—(CH₂)₂—N(Rₘ)(Rₙ), where each Rₗ, Rₘ and Rₐ is, independently, H or substituted or unsubstituted C₁-C₁₀ alkyl.

[0491] Examples of bicyclic nucleic acids (BNAs) include without limitation nucleosides comprising a bridge between the 4′ and the 2′ ribosyl ring atoms. In certain embodiments, antisense compounds provided herein include one or more BNA nucleosides wherein the bridge comprises one of the formulas: 4′-(CH₂)—O-2′ (LNA); 4′-(CH₂)—S-2′; 4′-(CH₂)₂—O-2′ (ENA); 4′-CH(CH₃)—O-2′ and 4′-CH(CH₂OCH₃)—O-2′ (and analogs thereof see U.S. Pat. No. 7,399,845, issued on Jul. 15, 2008); 4′-C(CH₃)(CH₃)—O-2′ (and analogs thereof see PCT/US2008/068922 published as WO/2009/006478, published Jan. 8, 2009); 4′-CH₂—N(OCH₃)-2′ (and analogs thereof see PCT/US2008/064591 published as WO/2008/150729, published Dec. 11, 2008); 4′-CH₂—O—N(CH₃)-2′ (see published U.S. Patent Application US2004-0171570, published Sep. 2, 2004); 4′-CH₂—N(R)—O-2′, wherein R is H, C₁-C₁₂ alkyl, or a protecting group (see U.S. Pat. No. 7,427,672, issued on Sep. 23, 2008); 4′-CH₂—C(H)(CH₃)-2′ (see Chattopadhyaya et al., J. Org. Chem., 2009, 74, 118-134); and 4′-CH₂—C(═CH₂)-2′ (and analogs thereof see PCT/US2008/066154 published as WO 2008/154401, published on Dec. 8, 2008).

[0492] Further bicyclic nucleosides have been reported in published literature (see for example: Srivastava et al., J. Am. Chem. Soc., 2007, 129(26) 8362-8379; Frieden et al., Nucleic Acids Research, 2003, 21, 6365-6372; Elayadi et al., Curr. Opinion Invens. Drugs, 2001, 2, 558-561; Braasch et al., Chem. Biol., 2001, 8, 1-7; Orum et al., Curr. Opinion Mol. Ther., 2001, 3, 239-243; Wahlestedt et al., Proc. Natl. Acad. Sci. U.S.A, 2000, 97, 5633-5638; Singh et al., Chem. Commun., 1998, 4, 455-456; Koshkin et al., Tetrahedron, 1998, 54, 3607-3630; Kumar et al., Bioorg. Med. Chem. Lett., 1998, 8, 2219-2222; Singh et al., J. Org. Chem., 1998, 63, 10035-10039; U.S. Pat. Nos. 7,399,845; 7,053,207; 7,034,133; 6,794,499; 6,770,748; 6,670,461; 6,525,191; 6,268,490; U.S. Patent Publication Nos.: US2008-0039618; US2007-0287831; US2004-0171570; U.S. patent applications, Ser. Nos. 12/129,154; 61/099,844; 61/097,787; 61/086,231; 61/056,564; 61/026,998; 61/026,995; 60/989,574; International applications WO 2007/134181; WO 2005/021570; WO 2004/106356; WO 94/14226; and PCT International Applications Nos.: PCT/US2008/068922; PCT/US2008/066154; and PCT/US2008/064591). Each of the foregoing bicyclic nucleosides can be prepared having one or more stereochemical sugar configurations including for example α-L-ribofuranose and β-D-ribofuranose (see PCT international application PCT/DK98/00393, published on Mar. 25, 1999 as WO 99/14226).

[0493] In certain embodiments, bicyclic nucleosides comprise a bridge between the 4′ and the 2′ carbon atoms of the pentofuranosyl sugar moiety including without limitation, bridges comprising 1 or from 1 to 4 linked groups independently selected from —[C(Rₐ)(R_{b})]ₙ—, —C(Rₐ)═C(R_{b})—, —C(Rₐ)═N—, —C(═NRₐ)—, —C(═O)—, —C(═S)—, —O—, —Si(Rₐ)₂—, —S(═O)ₓ—, and —N(Rₐ)—; wherein: x is 0, 1, or 2; n is 1, 2, 3, or 4; each Rₐ and R_{b} is, independently, H, a protecting group, hydroxyl, C₁-C₁₂ alkyl, substituted C₁-C₁₂ alkyl, C₂-C₁₂ alkenyl, substituted C₂-C₁₂ alkenyl, C₂-C₁₂ alkynyl, substituted C₂-C₁₂ alkynyl, C₅-C₂₀ aryl, substituted C₅-C₂₀ aryl, heterocycle radical, substituted heterocycle radical, heteroaryl, substituted heteroaryl, C₅-C₇ alicyclic radical, substituted C₅-C₇ alicyclic radical, halogen, OJ₁, NJ₁J₂, SJ₁, N₃, COOJ₁, acyl (C(═O)—H), substituted acyl, CN, sulfonyl (S(═O)₂-J₁), or sulfoxyl (S(═O)-J₁); and
[0494] each J₁ and J₂ is, independently, H, C₁-C₁₂ alkyl, substituted C₁-C₁₂ alkyl, C₂-C₁₂ alkenyl, substituted C₂-C₁₂ alkenyl, C₂-C₁₂ alkynyl, substituted C₂-C₁₂ alkynyl, C₅-C₂₀ aryl, substituted C₅-C₂₀ aryl, acyl (C(═O)—H), substituted acyl, a heterocycle radical, a substituted heterocycle radical, C₁-C₁₂ aminoalkyl, substituted C₁-C₁₂ aminoalkyl or a protecting group.

[0495] In certain embodiments, the bridge of a bicyclic sugar moiety is, —[C(Rₐ)(R_{b})]ₙ—, —[C(Rₐ)(R_{b})]ₙ—O—, —C(RₐR_{b})—N(R)—O— or —C(RₐR_{b})—O—N(R)—. In certain embodiments, the bridge is 4′-CH₂-2′, 4′-(CH₂)₂-2′, 4′-(CH₂)₃-2′, 4′-CH₂—O-2′, 4′-(CH₂)₂—O-2′, 4′-CH₂—O—N(R)-2′ and 4′-CH₂—N(R)—O-2′- wherein each R is, independently, H, a protecting group or C₁-C₁₂ alkyl.

[0496] In certain embodiments, bicyclic nucleosides are further defined by isomeric configuration. For example, a nucleoside comprising a 4′-(CH₂)—O-2′ bridge, may be in the α-L configuration or in the β-D configuration. Previously, α-L-methyleneoxy (4′-CH₂—O-2′) BNA's have been incorporated into antisense oligonucleotides that showed antisense activity (Frieden et al., Nucleic Acids Research, 2003, 21, 6365-6372).

[0497] In certain embodiments, bicyclic nucleosides include those having a 4′ to 2′ bridge wherein such bridges include without limitation, α-L-4′-(CH₂)—O-2′, β-D-4′-CH₂—O-2′, 4′-(CH₂)₂—O-2′, 4′-CH₂—O—N(R)-2′, 4′-CH₂—N(R)—O-2′, 4′-CH(CH₃)—O-2′, 4′-CH₂—S-2′, 4′-CH₂—N(R)-2′, 4′-CH₂—CH(CH₃)-2′, and 4′-(CH₂)₃-2′, wherein R is H, a protecting group or C₁-C₁₂ alkyl.

[0498] In certain embodiments, bicyclic nucleosides have the formula:

[chemical structure]

wherein:
[0499] Bx is a heterocyclic base moiety;
[0500] -Qₐ-Q_{b}-Q_{c}- is —CH₂—N(R_{c})—CH₂—, —C(═O)—N(R_{c})—CH₂—, —CH₂—O—N(R_{c})—, —CH₂—N(R_{c})—O— or —N(R_{c})—O—CH₂;
[0501] R_{c} is C₁-C₁₂ alkyl or an amino protecting group; and
[0502] Tₐ and T_{b} are each, independently H, a hydroxyl protecting group, a conjugate group, a reactive phosphorus group, a phosphorus moiety or a covalent attachment to a support medium.

[0503] In certain embodiments, bicyclic nucleosides have the formula:

[chemical structure]

wherein:
[0504] Bx is a heterocyclic base moiety;
[0505] Tₐ and T_{b} are each, independently H, a hydroxyl protecting group, a conjugate group, a reactive phosphorus group, a phosphorus moiety or a covalent attachment to a support medium;
[0506] Zₐ is C₁-C₆ alkyl, C₂-C₆ alkenyl, C₂-C₆ alkynyl, substituted C₁-C₆ alkyl, substituted C₂-C₆ alkenyl, substituted C₂-C₆ alkynyl, acyl, substituted acyl, substituted amide, thiol or substituted thiol.

[0507] In one embodiment, each of the substituted groups, is, independently, mono or poly substituted with substituent groups independently selected from halogen, oxo, hydroxyl, OJ_{c}, NJ_{c}J_{d}, SJ_{c}, N₃, OC(═X)J_{c}, and NJ_{c}C(═X)NJ_{c}J_{d}, wherein each J_{c}, J_{d} and Jₑ is, independently, H, C₁-C₆ alkyl, or substituted C₁-C₆ alkyl and X is O or NJ_{c}.

[0508] In certain embodiments, bicyclic nucleosides have the formula:

[chemical structure]

wherein:
[0509] Bx is a heterocyclic base moiety;
[0510] Tₐ and T_{b} are each, independently H, a hydroxyl protecting group, a conjugate group, a reactive phosphorus group, a phosphorus moiety or a covalent attachment to a support medium;
[0511] Z_{b} is C₁-C₆ alkyl, C₂-C₆ alkenyl, C₂-C₆ alkynyl, substituted C₁-C₆ alkyl, substituted C₂-C₆ alkenyl, substituted C₂-C₆ alkynyl or substituted acyl (C(═O)—).

[0512] In certain embodiments, bicyclic nucleosides have the formula:

[chemical structure]

wherein:
[0513] Bx is a heterocyclic base moiety;
[0514] Tₐ and T_{b} are each, independently H, a hydroxyl protecting group, a conjugate group, a reactive phosphorus group, a phosphorus moiety or a covalent attachment to a support medium;
[0515] R_{d} is C₁-C₆ alkyl, substituted C₁-C₆ alkyl, C₂-C₆ alkenyl, substituted C₂-C₆ alkenyl, C₂-C₆ alkynyl or substituted C₂-C₆ alkynyl;
[0516] each qₐ, q_{b}, q_{c} and q_{d} is, independently, H, halogen, C₁-C₆ alkyl, substituted C₁-C₆ alkyl, C₂-C₆ alkenyl, substituted C₂-C₆ alkenyl, C₂-C₆ alkynyl or substituted C₂-C₆ alkynyl, C₁-C₆ alkoxyl, substituted C₁-C₆ alkoxyl, acyl, substituted acyl, C₁-C₆ aminoalkyl or substituted C₁-C₆ aminoalkyl;

[0517] In certain embodiments, bicyclic nucleosides have the formula:

[chemical structure]

wherein:
[0518] Bx is a heterocyclic base moiety;
[0519] Tₐ and T_{b} are each, independently H, a hydroxyl protecting group, a conjugate group, a reactive phosphorus group, a phosphorus moiety or a covalent attachment to a support medium;
[0520] qₐ, q_{b}, qₑ and q_{f} are each, independently, hydrogen, halogen, C₁-C₁₂ alkyl, substituted C₁-C₁₂ alkyl, C₂-C₁₂ alkenyl, substituted C₂-C₁₂ alkenyl, C₂-C₁₂ alkynyl, substituted C₂-C₁₂ alkynyl, C₁-C₁₂ alkoxy, substituted C₁-C₁₂ alkoxy, OJⱼ, SJⱼ, SOJⱼ, SO₂Jⱼ, NJⱼJₖ, N₃, CN, C(═O)OJⱼ, C(═O)NJⱼJₖ, C(═O)Jⱼ, O—C(═O)NJⱼJₖ, N(H)C(═NH)NJⱼJₖ, N(H)C(═O)NJⱼJₖ or N(H)C(═S)NJⱼJₖ;
[0521] or qₑ and q_{f} together are ═C(q_{g})(qₕ);
[0522] q_{g} and qₕ are each, independently, H, halogen, C₁-C₁₂ alkyl or substituted C₁-C₁₂ alkyl.

[0523] The synthesis and preparation of adenine, cytosine, guanine, 5-methyl-cytosine, thymine and uracil bicyclic nucleosides having a 4′-CH₂—O-2′ bridge, along with their oligomerization, and nucleic acid recognition properties have been described (Koshkin et al., Tetrahedron, 1998, 54, 3607-3630). The synthesis of bicyclic nucleosides has also been described in WO 98/39352 and WO 99/14226.

[0524] Analogs of various bicyclic nucleosides that have 4′ to 2′ bridging groups such as 4′-CH₂—O-2′ and 4′-CH₂—S-2′, have also been prepared (Kumar et al., Bioorg. Med. Chem. Lett., 1998, 8, 2219-2222). Preparation of oligodeoxyribonucleotide duplexes comprising bicyclic nucleosides for use as substrates for nucleic acid polymerases has also been described (Wengel et al., WO 99/14226). Furthermore, synthesis of 2′-amino-BNA, a novel conformationally restricted high-affinity oligonucleotide analog has been described in the art (Singh et al., J. Org. Chem., 1998, 63, 10035-10039). In addition, 2′-amino- and 2′-methylamino-BNA's have been prepared and the thermal stability of their duplexes with complementary RNA and DNA strands has been previously reported.

[0525] In certain embodiments, bicyclic nucleosides have the formula:

[chemical structure]

wherein:
[0526] Bx is a heterocyclic base moiety;
[0527] Tₐ and T_{b} are each, independently H, a hydroxyl protecting group, a conjugate group, a reactive phosphorus group, a phosphorus moiety or a covalent attachment to a support medium;
[0528] each qᵢ, qⱼ, qₖ and qᵢ is, independently, H, halogen, C₁-C₁₂ alkyl, substituted C₁-C₁₂ alkyl, C₂-C₁₂ alkenyl, substituted C₂-C₁₂ alkenyl, C₂-C₁₂ alkynyl, substituted C₂-C₁₂ alkynyl, C₁-C₁₂ alkoxyl, substituted C₁-C₁₂ alkoxyl, OJⱼ, SJⱼ, SOJⱼ, SO₂Jⱼ, NJⱼJₖ, N₃, CN, C(═O)OJⱼ, C(═O)NJⱼJₖ, C(═O)Jⱼ, O—C(═O)NJⱼJₖ, N(H)C(═NH)NJⱼJₖ, N(H)C(═O)NJⱼJₖ or N(H)C(═S)NJⱼJₖ; and
[0529] qᵢ and qⱼ or qᵢ and qₖ together are ═C(q_{g})(qₕ), wherein q_{g} and qₕ are each, independently, H, halogen, C₁-C₁₂ alkyl or substituted C₁-C₁₂ alkyl.

[0530] One carbocyclic bicyclic nucleoside having a 4′-(CH₂)₃-2′ bridge and the alkenyl analog bridge 4′-CH═CH—CH₂-2′ have been described (Frier et al., Nucleic Acids Research, 1997, 25(22), 4429-4443 and Albaek et al., J. Org. Chem., 2006, 71, 7731-7740). The synthesis and preparation of carbocyclic bicyclic nucleosides along with their oligomerization and biochemical studies have also been described (Srivastava et al., J. Am. Chem. Soc. 2007, 129(26), 8362-8379).

[0531] In certain embodiments, bicyclic nucleosides include, but are not limited to, (A) α-L-methyleneoxy (4′-CH₂—O-2′) BNA, (B) β-D-methyleneoxy (4′-CH₂—O-2′) BNA, (C) ethyleneoxy (4′-(CH₂)₂—O-2′) BNA, (D) aminooxy (4′-CH₂—O—N(R)-2′) BNA, (E) oxyamino (4′-CH₂—N(R)—O-2′) BNA, (F) methyl(methyleneoxy) (4′-CH(CH₃)—O-2′) BNA (also referred to as constrained ethyl or cEt), (G) methylene-thio (4′-CH₂—S-2′) BNA, (H) methylene-amino (4′-CH₂—N(R)-2′) BNA, (I) methyl carbocyclic (4′-CH₂—CH(CH₃)-2′) BNA, (J) propylene carbocyclic (4′-(CH₂)₃-2′) BNA, and (K) vinyl BNA as depicted below.

[chemical structure]

[chemical structure]

wherein Bx is the base moiety and R is, independently, H, a protecting group, C₁-C₆ alkyl or C₁-C₆ alkoxy.

[0532] In certain embodiments, nucleosides are modified by replacement of the ribosyl ring with a sugar surrogate. Such modification includes without limitation, replacement of the ribosyl ring with a surrogate ring system (sometimes referred to as DNA analogs) such as a morpholino ring, a cyclohexenyl ring, a cyclohexyl ring or a tetrahydropyranyl ring such as one having one of the formula:

[chemical structure]

[0533] In certain embodiments, sugar surrogates are selected having the formula:

[chemical structure]

wherein:
[0534] Bx is a heterocyclic base moiety;
[0535] T₃ and T₄ are each, independently, an internucleoside linking group linking the tetrahydropyran nucleoside analog to the oligomeric compound or one of T₃ and T₄ is an internucleoside linking group linking the tetrahydropyran nucleoside analog to an oligomeric compound or oligonucleotide and the other of T₃ and T₄ is H, a hydroxyl protecting group, a linked conjugate group or a 5′ or 3-terminal group;
   q₁, q₂, q₃, q₄, q₅, q₆ and q₇ are each independently, H, C₁-C₆ alkyl, substituted C₁-C₆ alkyl, C₂-C₆ alkenyl, substituted C₂-C₆ alkenyl, C₂-C₆ alkynyl or substituted C₂-C₆ alkynyl; and
[0536] one of R₁ and R₂ is hydrogen and the other is selected from halogen, substituted or unsubstituted alkoxy, NJ₁J₂, SJ₁, N₃, OC(═X)J₁, OC(═X)NJ₁J₂, NJ₃C(═X)NJ₁J₂ and CN, wherein X is O, S or NJ₁ and each J₁, J₂ and J₃ is, independently, H or C₁-C₆ alkyl.

[0537] In certain embodiments, qᵢ, q₂, q₃, q₄, q₅, q₆ and q₇ are each H. In certain embodiments, at least one of qᵢ, q₂, q₃, q₄, q₅, q₆ and q₇ is other than H. In certain embodiments, at least one of qᵢ, q₂, q₃, q₄, q₅, q₆ and q₇ is methyl. In certain embodiments, THP nucleosides are provided wherein one of R₁ and R₂ is F. In certain embodiments, R₁ is fluoro and R₂ is H; R₁ is methoxy and R₂ is H, and R₁ is methoxyethoxy and R₂ is H.

[0538] Such sugar surrogates include, but are not limited to, what is referred to in the art as hexitol nucleic acid (HNA), altritol nucleic acid (ANA), and mannitol nucleic acid (MNA) (see Leumann, C. J., Bioorg. & Med. Chem., 2002, 10, 841-854).

[0539] In certain embodiments, sugar surrogates comprise rings having more than 5 atoms and more than one heteroatom. For example nucleosides comprising morpholino sugar moieties and their use in oligomeric compounds has been reported (see for example: Braasch et al., Biochemistry, 2002, 41, 4503-4510; and U.S. Pat. Nos. 5,698,685; 5,166,315; 5,185,444; and 5,034,506).

[0540] As used here, the term “morpholino” means a sugar surrogate having the following structure:

[chemical structure]

[0541] In certain embodiments, morpholinos may be modified, for example by adding or altering various substituent groups from the above morpholino structure. Such sugar surrogates are referred to herein as “modified morpholinos.”

[0542] In certain embodiments, antisense compounds comprise one or more modified cyclohexenyl nucleosides, which is a nucleoside having a six-membered cyclohexenyl in place of the pentofuranosyl residue in naturally occurring nucleosides. Modified cyclohexenyl nucleosides include, but are not limited to those described in the art (see for example commonly owned, published PCT Application WO 2010/036696, published on Apr. 10, 2010, Robeyns et al., J. Am. Chem. Soc., 2008, 130(6), 1979-1984; Horvith et al., Tetrahedron Letters, 2007, 48, 3621-3623; Nauwelaerts et al., J. Am. Chem. Soc., 2007, 129(30), 9340-9348; Gu et al., Nucleosides, Nucleotides & Nucleic Acids, 2005, 24(5-7), 993-998; Nauwelaerts et al., Nucleic Acids Research, 2005, 33(8), 2452-2463; Robeyns et al., Acta Crystallographica, Section F: Structural Biology and Crystallization Communications, 2005, F61(6), 585-586; Gu et al., Tetrahedron, 2004, 60(9), 2111-2123; Gu et al., Oligonucleotides, 2003, 13(6), 479-489; Wang et al., J. Org. Chem., 2003, 68, 4499-4505; Verbeure et al., Nucleic Acids Research, 2001, 29(24), 4941-4947; Wang et al., J Org. Chem., 2001, 66, 8478-82; Wang et al., Nucleosides, Nucleotides & Nucleic Acids, 2001, 20(4-7), 785-788; Wang et al., J. Am. Chem., 2000, 122, 8595-8602; Published PCT application, WO 06/047842; and Published PCT Application WO 01/049687; the text of each is incorporated by reference herein, in their entirety). Certain modified cyclohexenyl nucleosides have the formula:

[chemical structure]

wherein:
[0543] Bx is a heterocyclic base moiety;
[0544] T₃ and T₄ are each, independently, an internucleoside linking group linking the cyclohexenyl nucleoside analog to an antisense compound or one of T₃ and T₄ is an internucleoside linking group linking the tetrahydropyran nucleoside analog to an antisense compound and the other of T₃ and T₄ is H, a hydroxyl protecting group, a linked conjugate group, or a 5′- or 3′-terminal group; and
   qᵢ, q₂, q₃, q₄, q₅, q₆, q₇, q₈ and q₉ are each, independently, H, C₁-C₆ alkyl, substituted C₁-C₆ alkyl, C₂-C₆ alkenyl, substituted C₂-C₆ alkenyl, C₂-C₆ alkynyl, substituted C₂-C₆ alkynyl or other sugar substituent group.

[0545] Many other bicyclic and tricyclic sugar surrogate ring systems are also known in the art that can be used to modify nucleosides for incorporation into antisense compounds (see for example review article: Leumann, Christian J., Bioorg. & Med. Chem., 2002, 10, 841-854). Such ring systems can undergo various additional substitutions to enhance activity.

[0546] Methods for the preparations of modified sugars are well known to those skilled in the art. Some representative U.S. patents that teach the preparation of such modified sugars include without limitation, U.S.: 4,981,957; 5,118,800; 5,319,080; 5,359,044; 5,393,878; 5,446,137; 5,466,786; 5,514,785; 5,519,134; 5,567,811; 5,576,427; 5,591,722; 5,597,909; 5,610,300; 5,627,053; 5,639,873; 5,646,265; 5,670,633; 5,700,920; 5,792,847 and 6,600,032 and International Application PCT/US2005/019219, filed Jun. 2, 2005 and published as WO 2005/121371 on Dec. 22, 2005, and each of which is herein incorporated by reference in its entirety.

[0547] In nucleotides having modified sugar moieties, the nucleobase moieties (natural, modified or a combination thereof) are maintained for hybridization with an appropriate nucleic acid target.

[0548] In certain embodiments, antisense compounds targeted to a DMPK nucleic acid comprise one or more nucleotides having modified sugar moieties. In certain embodiments, the modified sugar moiety is 2′-MOE. In certain embodiments, the 2′-MOE modified nucleotides are arranged in a gapmer motif.

### Modified Nucleobases

[0549] Nucleobase (or base) modifications or substitutions are structurally distinguishable from, yet functionally interchangeable with, naturally occurring or synthetic unmodified nucleobases. Both natural and modified nucleobases are capable of participating in hydrogen bonding. Such nucleobase modifications can impart nuclease stability, binding affinity or some other beneficial biological property to antisense compounds. Modified nucleobases include synthetic and natural nucleobases such as, for example, 5-methylcytosine (5-me-C). Certain nucleobase substitutions, including 5-methylcytosine substitutions, are particularly useful for increasing the binding affinity of an antisense compound for a target nucleic acid. For example, 5-methylcytosine substitutions have been shown to increase nucleic acid duplex stability by 0.6-1.2° C. (Sanghvi, Y. S., Crooke, S. T. and Lebleu, B., eds., Antisense Research and Applications, CRC Press, Boca Raton, 1993, pp. 276-278).

[0550] Additional unmodified nucleobases include 5-hydroxymethyl cytosine, xanthine, hypoxanthine, 2-aminoadenine, 6-methyl and other alkyl derivatives of adenine and guanine, 2-propyl and other alkyl derivatives of adenine and guanine, 2-thiouracil, 2-thiothymine and 2-thiocytosine, 5-halouracil and cytosine, 5-propynyl (—C≡C—CH₃) uracil and cytosine and other alkynyl derivatives of pyrimidine bases, 6-azo uracil, cytosine and thymine, 5-uracil (pseudouracil), 4-thiouracil, 8-halo, 8-amino, 8-thiol, 8-thioalkyl, 8-hydroxyl and other 8-substituted adenines and guanines, 5-halo particularly 5-bromo, 5-trifluoromethyl and other 5-substituted uracils and cytosines, 7-methylguanine and 7-methyladenine, 2-F-adenine, 2-amino-adenine, 8-azaguanine and 8-azaadenine, 7-deazaguanine and 7-deazaadenine and 3-deazaguanine and 3-deazaadenine.

[0551] Heterocyclic base moieties can also include those in which the purine or pyrimidine base is replaced with other heterocycles, for example 7-deaza-adenine, 7-deazaguanosine, 2-aminopyridine and 2-pyridone. Nucleobases that are particularly useful for increasing the binding affinity of antisense compounds include 5-substituted pyrimidines, 6-azapyrimidines and N-2, N-6 and 0-6 substituted purines, including 2 aminopropyladenine, 5-propynyluracil and 5-propynylcytosine.

[0552] In certain embodiments, antisense compounds targeted to a DMPK nucleic acid comprise one or more modified nucleobases. In certain embodiments, gap-widened antisense oligonucleotides targeted to a DMPK nucleic acid comprise one or more modified nucleobases. In certain embodiments, the modified nucleobase is 5-methylcytosine. In certain embodiments, each cytosine is a 5-methylcytosine.

### Certain Antisense Compound Motifs

[0553] In certain embodiments, antisense compounds targeted to a DMPK nucleic acid have chemically modified subunits arranged in patterns, or motifs, to confer to the antisense compounds properties such as enhanced the inhibitory activity, increased binding affinity for a target nucleic acid, or resistance to degradation by in vivo nucleases.

[0554] Chimeric antisense compounds typically contain at least one region modified so as to confer increased resistance to nuclease degradation, increased cellular uptake, increased binding affinity for the target nucleic acid, and/or increased inhibitory activity. A second region of a chimeric antisense compound can optionally serve as a substrate for the cellular endonuclease RNase H, which cleaves the RNA strand of an RNA:DNA duplex.

[0555] Antisense compounds having a gapmer motif are considered chimeric antisense compounds. In a gapmer an internal region having a plurality of nucleotides that supports RNaseH cleavage is positioned between external regions having a plurality of nucleotides that are chemically distinct from the nucleosides of the internal region. In the case of an antisense oligonucleotide having a gapmer motif, the gap segment generally serves as the substrate for endonuclease cleavage, while the wing segments comprise modified nucleosides. In certain embodiments, the regions of a gapmer are differentiated by the types of sugar moieties comprising each distinct region. The types of sugar moieties that are used to differentiate the regions of a gapmer can in some embodiments include β-D-ribonucleosides, β-D-deoxyribonucleosides, 2′-modified nucleosides (such 2′-modified nucleosides can include 2′-MOE, and 2′-O—CH₃, among others), and bicyclic sugar modified nucleosides (such bicyclic sugar modified nucleosides can include those having a 4′-(CH₂)ₙ—O-2′ bridge, where n=1 or n=2). The wing-gap-wing motif is frequently described as “X—Y—Z”, where “X” represents the length of the 5′ wing region, “Y” represents the length of the gap region, and “Z” represents the length of the 3′ wing region. As used herein, a gapmer described as “X—Y—Z” has a configuration such that the gap segment is positioned immediately adjacent each of the 5′ wing segment and the 3′ wing segment. Thus, no intervening nucleotides exist between the 5′ wing segment and gap segment, or the gap segment and the 3′ wing segment. Any of the antisense compounds described herein can have a gapmer motif. In some embodiments, X and Z are the same, in other embodiments they are different. In a preferred embodiment, Y is between 8 and 15 nucleotides. X, Y or Z can be any of 1, 2, 3, 4, 5, 6, 7, 8, 9, 10, 11, 12, 13, 14, 15, 16, 17, 18, 19, 20, 25, 30 or more nucleotides. Thus, gapmers include, but are not limited to, for example 5-10-5, 4-8-4, 4-12-3, 4-12-4, 3-14-3, 2-13-5, 2-16-2, 1-18-1, 3-10-3, 2-10-2, 1-10-1, 2-8-2, 6-8-6, 5-8-5, 5-7-5, 1-8-1, or 2-6-2.

[0556] In certain embodiments, the antisense compound as a “wingmer” motif, having a wing-gap or gap-wing configuration, i.e. an X-Y or Y-Z configuration as described above for the gapmer configuration. Thus, wingmer configurations include, but are not limited to, for example 5-10, 8-4, 4-12, 12-4, 3-14, 16-2, 18-1, 10-3, 2-10, 1-10, 8-2, 2-13, or 5-13.

[0557] In certain embodiments, antisense compounds targeted to a DMPK nucleic acid possess a 5-10-5 gapmer motif. In certain embodiments, antisense compounds targeted to a DMPK nucleic acid possess a 5-7-5 gapmer motif. In certain embodiments, antisense compounds targeted to a DMPK nucleic acid possess a 3-10-3 gapmer motif. In certain embodiments, antisense compounds targeted to a DMPK nucleic acid possess a 4-8-4 gapmer motif.

[0558] In certain embodiments, an antisense compound targeted to a DMPK nucleic acid has a gap-widened motif.

[0559] In certain embodiments, antisense compounds of any of these gapmer or wingmer motifs contain at least 8, at least 9, at least 10, at least 11, at least 12, at least 13, at least 14, at least 15, at least 16, at least 17, at least 18, or at least 19, contiguous nucleobases of the nucleobase sequence of any of the exemplary antisense compounds described herein (e.g., at least 8 contiguous nucleobases of a nucleobase sequence recited in any one of SEQ ID NOs: 23, 24, 25, 26, 27, 28, 29, 30, 31, 32, or 33-874.

[0560] In certain embodiments, the present invention provides oligomeric compounds comprising oligonucleotides. In certain embodiments, such oligonucleotides comprise one or more chemical modification. In certain embodiments, chemically modified oligonucleotides comprise one or more modified sugars. In certain embodiments, chemically modified oligonucleotides comprise one or more modified nucleobases. In certain embodiments, chemically modified oligonucleotides comprise one or more modified internucleoside linkages. In certain embodiments, the chemically modifications (sugar modifications, nucleobase modifications, and/or linkage modifications) define a pattern or motif. In certain embodiments, the patterns of chemical modifications of sugar moieties, internucleoside linkages, and nucleobases are each independent of one another. Thus, an oligonucleotide may be described by its sugar modification motif, internucleoside linkage motif and/or nucleobase modification motif (as used herein, nucleobase modification motif describes the chemical modifications to the nucleobases independent of the sequence of nucleobases).

### Certain Sugar Motifs

[0561] In certain embodiments, oligonucleotides comprise one or more type of modified sugar moieties and/or naturally occurring sugar moieties arranged along an oligonucleotide or region thereof in a defined pattern or sugar modification motif. Such motifs may include any of the sugar modifications discussed herein and/or other known sugar modifications.

[0562] In certain embodiments, the oligonucleotides comprise or consist of a region having a gapmer sugar modification motif, which comprises two external regions or “wings” and an internal region or “gap.” The three regions of a gapmer motif (the 5′-wing, the gap, and the 3′-wing) form a contiguous sequence of nucleosides wherein at least some of the sugar moieties of the nucleosides of each of the wings differ from at least some of the sugar moieties of the nucleosides of the gap. Specifically, at least the sugar moieties of the nucleosides of each wing that are closest to the gap (the 3′-most nucleoside of the 5′-wing and the 5′-most nucleoside of the 3′-wing) differ from the sugar moiety of the neighboring gap nucleosides, thus defining the boundary between the wings and the gap. In certain embodiments, the sugar moieties within the gap are the same as one another. In certain embodiments, the gap includes one or more nucleoside having a sugar moiety that differs from the sugar moiety of one or more other nucleosides of the gap. In certain embodiments, the sugar modification motifs of the two wings are the same as one another (symmetric gapmer). In certain embodiments, the sugar modification motifs of the 5′-wing differs from the sugar modification motif of the 3′-wing (asymmetric gapmer).

### Certain 5′-Wings

[0563] In certain embodiments, the 5′-wing of a gapmer consists of 1 to 5 linked nucleosides. In certain embodiments, the 5′-wing of a gapmer consists of 2 to 5 linked nucleosides. In certain embodiments, the 5′-wing of a gapmer consists of 3 to 5 linked nucleosides. In certain embodiments, the 5′-wing of a gapmer consists of 4 or 5 linked nucleosides. In certain embodiments, the 5′-wing of a gapmer consists of 1 to 4 linked nucleosides. In certain embodiments, the 5′-wing of a gapmer consists of 1 to 3 linked nucleosides. In certain embodiments, the 5′-wing of a gapmer consists of 1 or 2 linked nucleosides. In certain embodiments, the 5′-wing of a gapmer consists of 2 to 4 linked nucleosides. In certain embodiments, the 5′-wing of a gapmer consists of 2 or 3 linked nucleosides. In certain embodiments, the 5′-wing of a gapmer consists of 3 or 4 linked nucleosides. In certain embodiments, the 5′-wing of a gapmer consists of 1 nucleoside. In certain embodiments, the 5′-wing of a gapmer consists of 2 linked nucleosides. In certain embodiments, the 5′-wing of a gapmer consists of 3linked nucleosides. In certain embodiments, the 5′-wing of a gapmer consists of 4 linked nucleosides. In certain embodiments, the 5′-wing of a gapmer consists of 5 linked nucleosides.

[0564] In certain embodiments, the 5′-wing of a gapmer comprises at least one bicyclic nucleoside. In certain embodiments, the 5′-wing of a gapmer comprises at least two bicyclic nucleosides. In certain embodiments, the 5′-wing of a gapmer comprises at least three bicyclic nucleosides. In certain embodiments, the 5′-wing of a gapmer comprises at least four bicyclic nucleosides. In certain embodiments, the 5′-wing of a gapmer comprises at least one constrained ethyl nucleoside. In certain embodiments, the 5′-wing of a gapmer comprises at least one LNA nucleoside. In certain embodiments, each nucleoside of the 5′-wing of a gapmer is a bicyclic nucleoside. In certain embodiments, each nucleoside of the 5′-wing of a gapmer is a constrained ethyl nucleoside. In certain embodiments, each nucleoside of the 5′-wing of a gapmer is a LNA nucleoside.

[0565] In certain embodiments, the 5′-wing of a gapmer comprises at least one non-bicyclic modified nucleoside. In certain embodiments, the 5′-wing of a gapmer comprises at least one 2′-substituted nucleoside. In certain embodiments, the 5′-wing of a gapmer comprises at least one 2′-MOE nucleoside. In certain embodiments, the 5′-wing of a gapmer comprises at least one 2′-OMe nucleoside. In certain embodiments, each nucleoside of the 5′-wing of a gapmer is a non-bicyclic modified nucleoside. In certain embodiments, each nucleoside of the 5′-wing of a gapmer is a 2′-substituted nucleoside. In certain embodiments, each nucleoside of the 5′-wing of a gapmer is a 2′-MOE nucleoside. In certain embodiments, each nucleoside of the 5′-wing of a gapmer is a 2′-OMe nucleoside.

[0566] In certain embodiments, the 5′-wing of a gapmer comprises at least one bicyclic nucleoside and at least one non-bicyclic modified nucleoside. In certain embodiments, the 5′-wing of a gapmer comprises at least one bicyclic nucleoside and at least one 2′-substituted nucleoside. In certain embodiments, the 5′-wing of a gapmer comprises at least one bicyclic nucleoside and at least one 2′-MOE nucleoside. In certain embodiments, the 5′-wing of a gapmer comprises at least one bicyclic nucleoside and at least one 2′-OMe nucleoside. In certain embodiments, the 5′-wing of a gapmer comprises at least one bicyclic nucleoside and at least one 2′-deoxynucleoside.

[0567] In certain embodiments, the 5′-wing of a gapmer comprises at least one constrained ethyl nucleoside and at least one non-bicyclic modified nucleoside. In certain embodiments, the 5′-wing of a gapmer comprises at least one constrained ethyl nucleoside and at least one 2′-substituted nucleoside. In certain embodiments, the 5′-wing of a gapmer comprises at least one constrained ethyl nucleoside and at least one 2′-MOE nucleoside. In certain embodiments, the 5′-wing of a gapmer comprises at least one constrained ethyl nucleoside and at least one 2′-OMe nucleoside. In certain embodiments, the 5′-wing of a gapmer comprises at least one constrained ethyl nucleoside and at least one 2′-deoxynucleoside.

[0568] In certain embodiments, the 5′-wing of a gapmer comprises at least one LNA nucleoside and at least one non-bicyclic modified nucleoside. In certain embodiments, the 5′-wing of a gapmer comprises at least one LNA nucleoside and at least one 2′-substituted nucleoside. In certain embodiments, the 5′-wing of a gapmer comprises at least one LNA nucleoside and at least one 2′-MOE nucleoside. In certain embodiments, the 5′-wing of a gapmer comprises at least one LNA nucleoside and at least one 2′-OMe nucleoside. In certain embodiments, the 5′-wing of a gapmer comprises at least one LNA nucleoside and at least one 2′-deoxynucleoside.

[0569] In certain embodiments, the 5′-wing of a gapmer comprises three constrained ethyl nucleosides. In certain embodiments, the 5′-wing of a gapmer comprises two bicyclic nucleosides and two non bicyclic modified nucleosides. In certain embodiments, the 5′-wing of a gapmer comprises two constrained ethyl nucleosides and two 2′-MOE nucleosides. In certain embodiments, the 5′-wing of a gapmer comprises two bicyclic nucleosides and two non bicyclic modified nucleosides. In certain embodiments, the 5′-wing of a gapmer comprises two constrained ethyl nucleosides and two 2′-MOE nucleosides. In certain embodiments, the 5′-wing of a gapmer comprises two constrained ethyl nucleosides and three 2′-MOE nucleosides.

[0570] In certain embodiments, the 5′-wing of a gapmer comprises three LNA nucleosides. In certain embodiments, the 5′-wing of a gapmer comprises two LNA nucleosides and two non bicyclic modified nucleosides. In certain embodiments, the 5′-wing of a gapmer comprises two LNA nucleosides and two 2′-MOE nucleosides. In certain embodiments, the 5′-wing of a gapmer comprises two LNA and two non bicyclic modified nucleosides. In certain embodiments, the 5′-wing of a gapmer comprises two LNA nucleosides and two 2′-MOE nucleosides. In certain embodiments, the 5′-wing of a gapmer comprises two LNA nucleosides and three 2′-MOE nucleosides.

[0571] In certain embodiments, the 5′-wing of a gapmer comprises three constrained ethyl nucleosides. In certain embodiments, the 5′-wing of a gapmer comprises two bicyclic nucleosides and two non bicyclic modified nucleosides. In certain embodiments, the 5′-wing of a gapmer comprises two constrained ethyl nucleosides and two 2′-OMe nucleosides. In certain embodiments, the 5′-wing of a gapmer comprises two bicyclic nucleosides and two non bicyclic modified nucleosides. In certain embodiments, the 5′-wing of a gapmer comprises two constrained ethyl nucleosides and two 2′-OMe nucleosides. In certain embodiments, the 5′-wing of a gapmer comprises two constrained ethyl nucleosides and three 2′-OMe nucleosides.

[0572] In certain embodiments, the 5′-wing of a gapmer comprises three LNA nucleosides. In certain embodiments, the 5′-wing of a gapmer comprises two LNA nucleosides and two non bicyclic modified nucleosides. In certain embodiments, the 5′-wing of a gapmer comprises two LNA nucleosides and two 2′-OMe nucleosides. In certain embodiments, the 5′-wing of a gapmer comprises two LNA and two non bicyclic modified nucleosides. In certain embodiments, the 5′-wing of a gapmer comprises two LNA nucleosides and two 2′-OMe nucleosides. In certain embodiments, the 5′-wing of a gapmer comprises two LNA nucleosides and three 2′-OMe nucleosides.

[0573] In certain embodiments, the 5′-wing of a gapmer has an AABB motif, wherein each A is selected from among a 2′-MOE nucleoside and a 2′OMe nucleoside. In certain embodiments, the 5′-wing of a gapmer has an AABB motif, wherein each B is selected from among a cEt, LNA, α-L-LNA, ENA and 2′-thio LNA nucleoside. In certain embodiments, the 5′-wing of a gapmer has an AABB motif, wherein each A represents a 2′-MOE nucleoside and each B represents a constrained ethyl nucleoside.

[0574] In certain embodiments, the 5′-wing of a gapmer has an AAABB motif, wherein each A is selected from among a 2′-MOE nucleoside and a 2′OMe nucleoside. In certain embodiments, the 5′-wing of a gapmer has an AABB motif, wherein each B is selected from among a cEt, LNA, α-L-LNA, ENA and 2′-thio LNA nucleoside. In certain embodiments, the 5′-wing of a gapmer has an AABB motif, wherein each A represents a 2′-MOE nucleoside and each B represents a constrained ethyl nucleoside.

### Certain 3′-Wings

[0575] In certain embodiments, the 3′-wing of a gapmer consists of 1 to 5 linked nucleosides. In certain embodiments, the 3′-wing of a gapmer consists of 2 to 5 linked nucleosides. In certain embodiments, the 3′-wing of a gapmer consists of 3 to 5 linked nucleosides. In certain embodiments, the 3′-wing of a gapmer consists of 4 or 5 linked nucleosides. In certain embodiments, the 3′-wing of a gapmer consists of 1 to 4 linked nucleosides. In certain embodiments, the 3′-wing of a gapmer consists of 1 to 3 linked nucleosides. In certain embodiments, the 3′-wing of a gapmer consists of 1 or 2 linked nucleosides. In certain embodiments, the 3′-wing of a gapmer consists of 2 to 4 linked nucleosides. In certain embodiments, the 3′-wing of a gapmer consists of 2 or 3 linked nucleosides. In certain embodiments, the 3′-wing of a gapmer consists of 3 or 4 linked nucleosides. In certain embodiments, the 3′-wing of a gapmer consists of 1 nucleoside. In certain embodiments, the 3′-wing of a gapmer consists of 2 linked nucleosides. In certain embodiments, the 3′-wing of a gapmer consists of 3linked nucleosides. In certain embodiments, the 3′-wing of a gapmer consists of 4 linked nucleosides. In certain embodiments, the 3′-wing of a gapmer consists of 5 linked nucleosides.

[0576] In certain embodiments, the 3′-wing of a gapmer comprises at least one bicyclic nucleoside. In certain embodiments, the 3′-wing of a gapmer comprises at least one constrained ethyl nucleoside. In certain embodiments, the 3′-wing of a gapmer comprises at least one LNA nucleoside. In certain embodiments, each nucleoside of the 3′-wing of a gapmer is a bicyclic nucleoside. In certain embodiments, each nucleoside of the 3′-wing of a gapmer is a constrained ethyl nucleoside. In certain embodiments, each nucleoside of the 3′-wing of a gapmer is a LNA nucleoside.

[0577] In certain embodiments, the 3′-wing of a gapmer comprises at least one non-bicyclic modified nucleoside. In certain embodiments, the 3′-wing of a gapmer comprises at least two non-bicyclic modified nucleosides. In certain embodiments, the 3′-wing of a gapmer comprises at least three non-bicyclic modified nucleosides. In certain embodiments, the 3′-wing of a gapmer comprises at least four non-bicyclic modified nucleosides. In certain embodiments, the 3′-wing of a gapmer comprises at least one 2′-substituted nucleoside. In certain embodiments, the 3′-wing of a gapmer comprises at least one 2′-MOE nucleoside. In certain embodiments, the 3′-wing of a gapmer comprises at least one 2′-OMe nucleoside. In certain embodiments, each nucleoside of the 3′-wing of a gapmer is a non-bicyclic modified nucleoside. In certain embodiments, each nucleoside of the 3′-wing of a gapmer is a 2′-substituted nucleoside. In certain embodiments, each nucleoside of the 3′-wing of a gapmer is a 2′-MOE nucleoside. In certain embodiments, each nucleoside of the 3′-wing of a gapmer is a 2′-OMe nucleoside.

[0578] In certain embodiments, the 3′-wing of a gapmer comprises at least one bicyclic nucleoside and at least one non-bicyclic modified nucleoside. In certain embodiments, the 3′-wing of a gapmer comprises at least one bicyclic nucleoside and at least one 2′-substituted nucleoside. In certain embodiments, the 3′-wing of a gapmer comprises at least one bicyclic nucleoside and at least one 2′-MOE nucleoside. In certain embodiments, the 3′-wing of a gapmer comprises at least one bicyclic nucleoside and at least one 2′-OMe nucleoside. In certain embodiments, the 3′-wing of a gapmer comprises at least one bicyclic nucleoside and at least one 2′-deoxynucleoside.

[0579] In certain embodiments, the 3′-wing of a gapmer comprises at least one constrained ethyl nucleoside and at least one non-bicyclic modified nucleoside. In certain embodiments, the 3′-wing of a gapmer comprises at least one constrained ethyl nucleoside and at least one 2′-substituted nucleoside. In certain embodiments, the 3′-wing of a gapmer comprises at least one constrained ethyl nucleoside and at least one 2′-MOE nucleoside. In certain embodiments, the 3′-wing of a gapmer comprises at least one constrained ethyl nucleoside and at least one 2′-OMe nucleoside. In certain embodiments, the 3′-wing of a gapmer comprises at least one constrained ethyl nucleoside and at least one 2′-deoxynucleoside.

[0580] In certain embodiments, the 3′-wing of a gapmer comprises at least one LNA nucleoside and at least one non-bicyclic modified nucleoside. In certain embodiments, the 3′-wing of a gapmer comprises at least one LNA nucleoside and at least one 2′-substituted nucleoside. In certain embodiments, the 3′-wing of a gapmer comprises at least one LNA nucleoside and at least one 2′-MOE nucleoside. In certain embodiments, the 3′-wing of a gapmer comprises at least one LNA nucleoside and at least one 2′-OMe nucleoside. In certain embodiments, the 3′-wing of a gapmer comprises at least one LNA nucleoside and at least one 2′-deoxynucleoside.

[0581] In certain embodiments, the 3′-wing of a gapmer comprises three constrained ethyl nucleosides. In certain embodiments, the 3′-wing of a gapmer comprises two bicyclic nucleosides and two non bicyclic modified nucleosides. In certain embodiments, the 3′-wing of a gapmer comprises two constrained ethyl nucleosides and two 2′-MOE nucleosides. In certain embodiments, the 3′-wing of a gapmer comprises two bicyclic nucleosides and two non bicyclic modified nucleosides. In certain embodiments, the 3′-wing of a gapmer comprises two constrained ethyl nucleosides and two 2′-MOE nucleosides. In certain embodiments, the 5′-wing of a gapmer comprises two constrained ethyl nucleosides and three 2′-MOE nucleosides.

[0582] In certain embodiments, the 3′-wing of a gapmer comprises three LNA nucleosides. In certain embodiments, the 3′-wing of a gapmer comprises two LNA nucleosides and two non bicyclic modified nucleosides. In certain embodiments, the 3′-wing of a gapmer comprises two LNA nucleosides and two 2′-MOE nucleosides. In certain embodiments, the 3′-wing of a gapmer comprises two LNA and two non bicyclic modified nucleosides. In certain embodiments, the 3′-wing of a gapmer comprises two LNA nucleosides and two 2′-MOE nucleosides. In certain embodiments, the 3′-wing of a gapmer comprises two LNA nucleosides and three 2′-MOE nucleosides.

[0583] In certain embodiments, the 3′-wing of a gapmer comprises three constrained ethyl nucleosides. In certain embodiments, the 3′-wing of a gapmer comprises two bicyclic nucleosides and two non bicyclic modified nucleosides. In certain embodiments, the 3′-wing of a gapmer comprises two constrained ethyl nucleosides and two 2′-OMe nucleosides. In certain embodiments, the 3′-wing of a gapmer comprises two bicyclic nucleosides and two non bicyclic modified nucleosides. In certain embodiments, the 3′-wing of a gapmer comprises two constrained ethyl nucleosides and two 2′-OMe nucleosides. In certain embodiments, the 3′-wing of a gapmer comprises two constrained ethyl nucleosides and three 2′-OMe nucleosides.

[0584] In certain embodiments, the 3′-wing of a gapmer comprises three LNA nucleosides. In certain embodiments, the 3′-wing of a gapmer comprises two LNA nucleosides and two non bicyclic modified nucleosides. In certain embodiments, the 3′-wing of a gapmer comprises two LNA nucleosides and two 2′-OMe nucleosides. In certain embodiments, the 3′-wing of a gapmer comprises two LNA and two non bicyclic modified nucleosides. In certain embodiments, the 3′-wing of a gapmer comprises two LNA nucleosides and two 2′-OMe nucleosides. In certain embodiments, the 3′-wing of a gapmer comprises two LNA nucleosides and three 2′-OMe nucleosides.

[0585] In certain embodiments, the 3′-wing of a gapmer has a BBAA motif, wherein each A is selected from among a 2′-MOE nucleoside and a 2′OMe nucleoside. In certain embodiments, the 3′-wing of a gapmer has an BBAA motif, wherein each B is selected from among a cEt, LNA, α-L-LNA, ENA and 2′-thio LNA nucleoside. In certain embodiments, the 3′-wing of a gapmer has a BBAA motif, wherein each A represents a 2′-MOE nucleoside and each B represents a constrained ethyl nucleoside.

[0586] In certain embodiments, the 3′-wing of a gapmer has a BBAAA motif, wherein each A is selected from among a 2′-MOE nucleoside and a 2′OMe nucleoside. In certain embodiments, the 3′-wing of a gapmer has a BBAA motif, wherein each B is selected from among a cEt, LNA, α-L-LNA, ENA and 2′-thio LNA nucleoside. In certain embodiments, the 3′-wing of a gapmer has a BBAA motif, wherein each A represents a 2′-MOE nucleoside and each B represents a constrained ethyl nucleoside.

### Compositions and Methods for Formulating Pharmaceutical Compositions

[0587] Antisense oligonucleotides can be admixed with pharmaceutically acceptable active or inert substance for the preparation of pharmaceutical compositions or formulations. Compositions and methods for the formulation of pharmaceutical compositions are dependent upon a number of criteria, including, but not limited to, route of administration, extent of disease, or dose to be administered.

[0588] Antisense compound targeted to a DMPK nucleic acid can be utilized in pharmaceutical compositions by combining the antisense compound with a suitable pharmaceutically acceptable diluent or carrier. A pharmaceutically acceptable diluent includes phosphate-buffered saline (PBS). PBS is a diluent suitable for use in compositions to be delivered parenterally. Accordingly, in one embodiment, employed in the methods described herein is a pharmaceutical composition comprising an antisense compound targeted to a DMPK nucleic acid and a pharmaceutically acceptable diluent. In certain embodiments, the pharmaceutically acceptable diluent is PBS. In certain embodiments, the antisense compound is an antisense oligonucleotide.

[0589] Pharmaceutical compositions comprising antisense compounds encompass any pharmaceutically acceptable salts, esters, or salts of such esters, or any other oligonucleotide which, upon administration to an animal, including a human, is capable of providing (directly or indirectly) the biologically active metabolite or residue thereof. Accordingly, for example, the disclosure is also drawn to pharmaceutically acceptable salts of antisense compounds, prodrugs, pharmaceutically acceptable salts of such prodrugs, and other bioequivalents. Suitable pharmaceutically acceptable salts include, but are not limited to, sodium and potassium salts.

[0590] A prodrug can include the incorporation of additional nucleosides at one or both ends of an antisense compound which are cleaved by endogenous nucleases within the body, to form the active antisense compound.

### Conjugated Antisense Compounds

[0591] Antisense compounds can be covalently linked to one or more moieties or conjugates which enhance the activity, cellular distribution or cellular uptake of the resulting antisense oligonucleotides. Typical conjugate groups include cholesterol moieties and lipid moieties. Additional conjugate groups include carbohydrates, phospholipids, biotin, phenazine, folate, phenanthridine, anthraquinone, acridine, fluoresceins, rhodamines, coumarins, and dyes.

[0592] Antisense compounds can also be modified to have one or more stabilizing groups that are generally attached to one or both termini of antisense compounds to enhance properties such as, for example, nuclease stability. Included in stabilizing groups are cap structures. These terminal modifications protect the antisense compound having terminal nucleic acid from exonuclease degradation, and can help in delivery and/or localization within a cell. The cap can be present at the 5′-terminus (5′-cap), or at the 3′-terminus (3′-cap), or can be present on both termini. Cap structures are well known in the art and include, for example, inverted deoxy abasic caps. Further 3′ and 5′-stabilizing groups that can be used to cap one or both ends of an antisense compound to impart nuclease stability include those disclosed in WO 03/004602 published on Jan. 16, 2003.

### Cell Culture and Antisense Compounds Treatment

[0593] The effects of antisense compounds on the level, activity or expression of DMPK nucleic acids can be tested in vitro in a variety of cell types. Cell types used for such analyses are available from commercial vendors (e.g. American Type Culture Collection, Manassas, VA; Zen-Bio, Inc., Research Triangle Park, NC; Clonetics Corporation, Walkersville, MD) and cells are cultured according to the vendor's instructions using commercially available reagents (e.g. Invitrogen Life Technologies, Carlsbad, CA). Illustrative cell types include, but are not limited to, HepG2 cells, Hep3B cells, primary hepatocytes, A549 cells, GM04281 fibroblasts and LLC-MK2 cells.

### In Vitro Testing of Antisense Oligonucleotides

[0594] Described herein are methods for treatment of cells with antisense oligonucleotides, which can be modified appropriately for treatment with other antisense compounds.

[0595] In general, cells are treated with antisense oligonucleotides when the cells reach approximately 60-80% confluence in culture.

[0596] One reagent commonly used to introduce antisense oligonucleotides into cultured cells includes the cationic lipid transfection reagent LIPOFECTIN® (Invitrogen, Carlsbad, CA). Antisense oligonucleotides are mixed with LIPOFECTIN® in OPTI-MEM® 1 (Invitrogen, Carlsbad, CA) to achieve the desired final concentration of antisense oligonucleotide and a LIPOFECTIN® concentration that typically ranges 2 to 12 μg/mL per 100 nM antisense oligonucleotide.

[0597] Another reagent used to introduce antisense oligonucleotides into cultured cells includes LIPOFECTAMINE 2000® (Invitrogen, Carlsbad, CA). Antisense oligonucleotide is mixed with LIPOFECTAMINE 2000® in OPTI-MEM® 1 reduced serum medium (Invitrogen, Carlsbad, CA) to achieve the desired concentration of antisense oligonucleotide and a LIPOFECTAMINE® concentration that typically ranges 2 to 12 μg/mL per 100 nM antisense oligonucleotide.

[0598] Another reagent used to introduce antisense oligonucleotides into cultured cells includes Cytofectin® (Invitrogen, Carlsbad, CA). Antisense oligonucleotide is mixed with Cytofectin® in OPTI-MEM® 1 reduced serum medium (Invitrogen, Carlsbad, CA) to achieve the desired concentration of antisense oligonucleotide and a Cytofectin® concentration that typically ranges 2 to 12 μg/mL per 100 nM antisense oligonucleotide.

[0599] Another technique used to introduce antisense oligonucleotides into cultured cells includes electroporation.

[0600] Cells are treated with antisense oligonucleotides by routine methods. Cells are typically harvested 16-24 hours after antisense oligonucleotide treatment, at which time RNA or protein levels of target nucleic acids are measured by methods known in the art and described herein. In general, when treatments are performed in multiple replicates, the data are presented as the average of the replicate treatments.

[0601] The concentration of antisense oligonucleotide used varies from cell line to cell line. Methods to determine the optimal antisense oligonucleotide concentration for a particular cell line are well known in the art. Antisense oligonucleotides are typically used at concentrations ranging from 1 nM to 300 nM when transfected with LIPOFECTAMINE2000®, Lipofectin or Cytofectin. Antisense oligonucleotides are used at higher concentrations ranging from 625 to 20,000 nM when transfected using electroporation.

### RNA Isolation

[0602] RNA analysis can be performed on total cellular RNA or poly(A)+ mRNA. Methods of RNA isolation are well known in the art. RNA is prepared using methods well known in the art, for example, using the TRIZOL® Reagent (Invitrogen, Carlsbad, CA) according to the manufacturer's recommended protocols.

### Analysis of Inhibition of Target Levels or Expression

[0603] Inhibition of levels or expression of a DMPK nucleic acid can be assayed in a variety of ways known in the art. For example, target nucleic acid levels can be quantitated by, e.g., Northern blot analysis, competitive polymerase chain reaction (PCR), or quantitative real-time PCR. RNA analysis can be performed on total cellular RNA or poly(A)+mRNA. Methods of RNA isolation are well known in the art. Northern blot analysis is also routine in the art. Quantitative real-time PCR can be conveniently accomplished using the commercially available ABI PRISM® 7600, 7700, or 7900 Sequence Detection System, available from PE-Applied Biosystems, Foster City, CA and used according to manufacturer's instructions.

### Quantitative Real-Time PCR Analysis of Target RNA Levels

[0604] Quantitation of target RNA levels can be accomplished by quantitative real-time PCR using the ABI PRISM® 7600, 7700, or 7900 Sequence Detection System (PE-Applied Biosystems, Foster City, CA) according to manufacturer's instructions. Methods of quantitative real-time PCR are well known in the art.

[0605] Prior to real-time PCR, the isolated RNA is subjected to a reverse transcriptase (RT) reaction, which produces complementary DNA (cDNA) that is then used as the substrate for the real-time PCR amplification. The RT and real-time PCR reactions are performed sequentially in the same sample well. RT and real-time PCR reagents are obtained from Invitrogen (Carlsbad, CA). RT, real-time-PCR reactions are carried out by methods well known to those skilled in the art.

[0606] Gene (or RNA) target quantities obtained by real time PCR are normalized using either the expression level of a gene whose expression is constant, such as cyclophilin A, or by quantifying total RNA using RIBOGREEN® (Invitrogen, Inc. Carlsbad, CA). Cyclophilin A expression is quantified by real time PCR, by being run simultaneously with the target, multiplexing, or separately. Total RNA is quantified using RIBOGREEN® RNA quantification reagent (Invitrogen, Inc. Eugene, OR). Methods of RNA quantification by RIBOGREEN® are taught in Jones, L. J., et al, (Analytical Biochemistry, 1998, 265, 368-374). A CYTOFLUOR® 4000 instrument (PE Applied Biosystems) is used to measure RIBOGREEN® fluorescence.

[0607] Probes and primers are designed to hybridize to a DMPK nucleic acid. Methods for designing real-time PCR probes and primers are well known in the art, and can include the use of software such as PRIMER EXPRESS® Software (Applied Biosystems, Foster City, CA).

### Analysis of Protein Levels

[0608] Antisense inhibition of DMPK nucleic acids can be assessed by measuring DMPK protein levels. Protein levels of DMPK can be evaluated or quantitated in a variety of ways well known in the art, such as immunoprecipitation, Western blot analysis (immunoblotting), enzyme-linked immunosorbent assay (ELISA), quantitative protein assays, protein activity assays (for example, caspase activity assays), immunohistochemistry, immunocytochemistry or fluorescence-activated cell sorting (FACS). Antibodies directed to a target can be identified and obtained from a variety of sources, such as the MSRS catalog of antibodies (Aerie Corporation, Birmingham, MI), or can be prepared via conventional monoclonal or polyclonal antibody generation methods well known in the art.

### In Vivo Testing of Antisense Compounds

[0609] Antisense compounds, for example, antisense oligonucleotides, are tested in animals to assess their ability to inhibit expression of DMPK and produce phenotypic changes. Testing can be performed in normal animals, or in experimental disease models, for example, the HSA^{LR} mouse model of myotonic dystrophy (DM1).

[0610] The HSA^{LR} mouse model is an established model for DM1 (Mankodi, A. et al. Science. 289: 1769, 2000). The mice carry a human skeletal actin (hACTA1) transgene with 220 CTG repeats inserted in the 3′ UTR of the gene. The hACTA1-CUG^{exp} transcript accumulates in nuclear foci in skeletal muscles and results in myotonia similar to that in human DM1 (Mankodi, A. et al. Mol. Cell 10: 35, 2002; Lin, X. et al. Hum. Mol. Genet. 15: 2087, 2006). Hence, it is expected that amelioration of DM1 symptoms in the HSA^{LR} mouse by antisense inhibition of the hACTA1 transgene would predict amelioration of similar symptoms in human patients by antisense inhibition of the DMPK transcript.

[0611] Expression of CUG^{exp} RNA in mice causes extensive remodeling of the muscle transcriptome, much of which is reproduced by ablation of MBNL1. Hence, it is expected that normalization of the transcriptome in HSA^{LR} mice would predict normalization of the human transcriptome in DM1 patients by antisense inhibition of the DMPK transcript.

[0612] For administration to animals, antisense oligonucleotides are formulated in a pharmaceutically acceptable diluent, such as phosphate-buffered saline. Administration includes parenteral routes of administration. Following a period of treatment with antisense oligonucleotides, RNA is isolated from tissue and changes in DMPK nucleic acid expression are measured. Changes in DMPK protein levels are also measured.

### Splicing

[0613] Myotonic dystrophy (DM1) is caused by CTG repeat expansions in the 3′ untranslated region of the DMPK gene (Brook, J. D. et al. Cell. 68: 799, 1992). This mutation leads to RNA dominance, a process in which expression of RNA containing an expanded CUG repeat (CUGexp) induces cell dysfunction (Osborne R J and Thornton C A., Human Molecular Genetics., 2006, 15(2): R162-R169). Such CUGexp are retained in the nuclear foci of skeletal muscles (Davis, B. M. et al. Proc. Natl. Acad. Sci. U.S.A. 94:7388, 1997). The accumulation of CUGexp in the nuclear foci leads to the sequestration of poly(CUG)-binding proteins, such as, Muscleblind-like 1 (MBLN1) (Miller, J. W. et al. EMBO J. 19: 4439, 2000). MBLN1 is a splicing factor and regulates the splicing of genes such as Sercal, CIC-1, Titin, and Zasp. Therefore, sequestration of MBLN1 by CUGexp triggers misregulated alternative splicing of the exons of genes that MBLN1 normally controls (Lin, X. et al. Hum. Mol. Genet. 15: 2087, 2006). Correction of alternative splicing in an animal displaying such disregulation, such as, for example, in a DM1 patient and the HSALR mouse model, is a useful indicator for the efficacy of a treatment, including treatment with an antisense oligonucleotide.

### Certain Antisense Mechanisms

[0614] Myotonic dystrophy (DM1) is caused by CTG repeat expansions in the 3′ untranslated region of the DMPK gene. In certain embodiments, expansions in the 3′ untranslated region of the DMPK gene results in the transcription of RNA containing an expanded CUG repeat, and RNA containing an expanded CUG repeat (CUGexp) is retained in the nuclear foci of skeletal muscles. In certain instances, the cellular machinery responsible for exporting mRNA from the nucleus into the cytoplasm does not export RNA containing an expanded CUG repeat from the nucleus or does so less efficiently. In certain embodiments, cells do not export DMPK CUGexp mRNA from the nucleus or such export is reduced. Accordingly, in certain embodiments, DMPK CUGexp mRNA accumulates in the nucleus. In certain embodiments, more copies of DMPK CUGexp mRNA are present in the nucleus of a cell than are copies of wild-type DMPK mRNA, which is exported normally. In such embodiments, antisense compounds that reduce target in the nucleus will preferentially reduce mutant DMPK CUGexp mRNA relative to wild type DMPK mRNA, due to their relative abundances in the nucleus, even if the antisense compound does not otherwise distinguish between mutant and wild type. Since RNase H dependent antisense compounds are active in the nucleus, such compounds are particularly well suited for such use.

[0615] In certain instances, wild-type DMPK pre-mRNA and mutant CUGexp DMPK pre-mRNA are expected to be processed into mRNA at similar rate. Accordingly, approximately the same amount of wild-type DMPK pre-mRNA and mutant CUGexp DMPK pre-mRNA are expected to be present in the nucleus of a cell. However, after processing, wild type DMPK mRNA is exported from the nucleus relatively quickly, and mutant CUGexp DMPK mRNA is exported slowly or not at all. In certain such embodiments, mutant CUGexp DMPK mRNA accumulates in the nucleus in greater amounts than wild-type DMPK mRNA. In certain such embodiments, an antisense oligonucleotide targeted to the mRNA, will preferentially reduce the expression of the mutant CUGexp DMPK mRNA compared to the wild-type DMPK mRNA because more copies of the mutant CUGexp DMPK mRNA are present in the nucleus of the cell. In certain embodiments, antisense compounds targeted to pre-mRNA and not mRNA (e.g., targeting an intron) are not expected to preferentially reduce mutant DMPK relative to wild type, because the nuclear abundance of the two pre-mRNAs is likely to be similar. In certain embodiments, antisense compounds described herein are not targeted to introns of DMPK pre-mRNA. In certain embodiments, antisense compounds described herein are targeted to exons or exon-exon junctions present in DMPK mRNA. In certain embodiments, use of an antisense oligonucleotide to target the mRNA is therefore preferred because an antisense oligonucleotide having one or more features described herein (i) has activity in the nucleus of a cell and (2) will preferentially reduce mutant CUGexp DMPK mRNA compared to wild-type DMPK mRNA.

### Certain Biomarkers

[0616] DM1 severity in mouse models is determined, at least in part, by the level of CUG^{exp} transcript accumulation in the nucleus or nuclear foci. A useful physiological marker for DM1 severity is the development of high-frequency runs of involuntary action potentials (myotonia).

### Certain Indications

[0617] In certain embodiments, provided herein are methods of treating an individual comprising administering one or more pharmaceutical compositions as described herein. In certain embodiments, the individual has type 1 myotonic dystrophy (DM1).

[0618] Accordingly, provided herein are methods for ameliorating a symptom associated with type 1 myotonic dystrophy in a subject in need thereof. In certain embodiments, provided is a method for reducing the rate of onset of a symptom associated with type 1 myotonic dystrophy. In certain embodiments, provided is a method for reducing the severity of a symptom associated with type 1 myotonic dystrophy. In certain embodiments, symptoms associated with DM1 include muscle stiffness, myotonia, disabling distal weakness, weakness in face and jaw muscles, difficulty in swallowing, drooping of the eyelids (ptosis), weakness of neck muscles, weakness in arm and leg muscles, persistent muscle pain, hypersomnia, muscle wasting, dysphagia, respiratory insufficiency, irregular heartbeat, heart muscle damage, apathy, insulin resistance, and cataracts. In children, the symptoms may also be developmental delays, learning problems, language and speech issues, and personality development issues.

[0619] In certain embodiments, the methods comprise administering to an individual in need thereof a therapeutically effective amount of a compound targeted to a DMPK nucleic acid.

[0620] In certain embodiments, administration of an antisense compound targeted to a DMPK nucleic acid results in reduction of DMPK expression by at least about 15%, by at least about 20%, by at least about 25%, by at least about 30%, by at least about 35%, by at least about 40%, by at least about 45%, by at least about 50%, by at least about 55%, by at least about 60%, by least about 65%, by least about 70%, by least about 75%, by least about 80%, by at least about 85%, by at least about 90%, by at least about 95% or by at least about 99%, or a range defined by any two of these values.

[0621] In certain embodiments, pharmaceutical compositions comprising an antisense compound targeted to DMPK are used for the preparation of a medicament for treating a patient suffering or susceptible to type 1 myotonic dystrophy.

[0622] In certain embodiments, the methods described herein include administering a compound comprising a modified oligonucleotide having a contiguous nucleobases portion as described herein of a sequence recited in SEQ ID NOs: 23, 24, 25, 26, 27, 28, 29, 30, 31, 32, or 33-874.

### Administration

[0623] In certain embodiments, the compounds and compositions as described herein are administered parenterally.

[0624] In certain embodiments, parenteral administration is by infusion. Infusion can be chronic or continuous or short or intermittent. In certain embodiments, infused pharmaceutical agents are delivered with a pump. In certain embodiments, parenteral administration is by injection (e.g., bolus injection). The injection can be delivered with a syringe.

[0625] Parenteral administration includes subcutaneous administration, intravenous administration, intramuscular administration, intraarterial administration, intraperitoneal administration, or intracranial administration, e.g., intrathecal or intracerebroventricular administration. Administration can be continuous, or chronic, or short, or intermittent.

[0626] In certain embodiments, the administering is subcutaneous, intravenous, intracerebral, intracerebroventricular, intrathecal or another administration that results in a systemic effect of the oligonucleotide (systemic administration is characterized by a systemic effect, i.e., an effect in more than one tissue) or delivery to the CNS or to the CSF.

[0627] The duration of action as measured by inhibition of alpha 1 actin and reduction of myotonia in the HSA^{LR} mouse model of DM1 is prolonged in muscle tissue including quadriceps, gastrocnemius, and the tibialis anterior (see Examples, below). Subcutaneous injections of antisense oligonucleotide for 4 weeks results in inhibition of alpha 1 actin by at least 70% in quadriceps, gastrocnemius, and the tibialis anterior in HSA^{LR} mice for at least 11 weeks (77 days) after termination of dosing. Subcutaneous injections of antisense oligonucleotide for 4 weeks results in elimination of myotonia in quadriceps, gastrocnemius, and the tibialis anterior in HSA^{LR} mice for at least 11 weeks (77 days) after termination of dosing.

[0628] In certain embodiments, delivery of a compound of composition, as described herein, results in at least 70% down-regulation of a target mRNA and/or target protein for at least 77 days. In certain embodiments, delivery of a compound or composition, as described herein, results in 50%, 55%, 60%, 65%, 70%, 75%, 80%, 85%, 90%, 95%, or 100% down-regulation of a target mRNA and/or target protein for at least 30 days, at least 35 days, at least 40 days, at least 45 days, at least 50 days, at least 55 days, at least 60 days, at least 65 days, at least 70 days, at least 75 days, at least 76 days, at least 77 days, at least 78 days, at least 79 days, at least 80 days, at least 85 days, at least 90 days, at least 95 days, at least 100 days, at least 105 days, at least 110 days, at least 115 days, at least 120 days, at least 1 year.

[0629] In certain embodiments, an antisense oligonucleotide is delivered by injection or infusion once every 77 days. In certain embodiments, an antisense oligonucleotide is delivered by injection or infusion once every month, every two months, every three months, every 6 months, twice a year or once a year.

### Certain Combination Therapies

[0630] In certain embodiments, a first agent comprising the modified oligonucleotide of the invention is co-administered with one or more secondary agents. In certain embodiments, such second agents are designed to treat the same type 1 myotonic dystrophy as the first agent described herein. In certain embodiments, such second agents are designed to treat a different disease, disorder, or condition as the first agent described herein. In certain embodiments, such second agents are designed to treat an undesired side effect of one or more pharmaceutical compositions as described herein. In certain embodiments, second agents are co-administered with the first agent to treat an undesired effect of the first agent. In certain embodiments, second agents are co-administered with the first agent to produce a combinational effect. In certain embodiments, second agents are co-administered with the first agent to produce a synergistic effect.

[0631] In certain embodiments, a first agent and one or more second agents are administered at the same time. In certain embodiments, the first agent and one or more second agents are administered at different times. In certain embodiments, the first agent and one or more second agents are prepared together in a single pharmaceutical formulation. In certain embodiments, the first agent and one or more second agents are prepared separately.

### Certain Comparator Compounds

[0632] In certain embodiments, the compounds disclosed herein benefit from one or more improved in vitro and/or in vivo properties relative to an appropriate comparator compound.

[0633] In certain embodiments, ISIS 445569, a 5-10-5 MOE gapmer, having a sequence of (from 5′ to 3′) CGGAGCGGTTGTGAACTGGC (incorporated herein as SEQ ID NO: 24), wherein each internucleoside linkage is a phosphorothioate linkage, each cytosine is a 5-methylcytosine, and each of nucleosides 1-5 and 16-20 comprise a 2′-O-methoxyethyl moiety, which was previously described in WO 2012/012443, incorporated herein by reference, is a comparator compound.

[0634] ISIS 445569 is an appropriate representative comparator compound because ISIS 445569 demonstrates statistically significant reduction of human DMPK in vitro as measured using a plurality of primer probe sets (see e.g. Example 1 and Example 2 of WO 2012/012443). Additionally, ISIS 445569 demonstrates statistically significant dose-dependent inhibition of human DMPK in vitro in both human skeletal muscle cells and DM1 fibroblasts (see e.g. Example 4 and Example 5 of WO 2012/012443 and Example 28 of WO 2012/012467). ISIS 445569 also reduces human DMPK transcript expression in transgenic mice (Examples 23 and 24 of WO 2012/012443 and Examples 29 and 30 of WO 2012/012467). ISIS 445569 was a preferred human DMPK antisense compound in WO 2012/012443 and WO 2012/012467.

### Certain Compounds

[0635] In certain embodiments, the compounds disclosed herein benefit from improved activity and/or improved tolerability relative to appropriate comparator compounds, such as ISIS 445569. For example, in certain embodiments, ISIS 598769, ISIS 598768, and/or ISIS 486178 have more activity and/or tolerability than appropriate comparator compounds, such as ISIS 445569.

[0636] In certain embodiments, the compounds disclosed herein are more potent than appropriate comparator compounds, such as ISIS 445569. For example, as provided in Example 10 (described herein), ISIS 598769 achieved an IC₅₀ of 1.9 μM, ISIS 598768 achieved an IC₅₀ of 1.2 μM, and ISIS 486178 achieved an IC₅₀ of 0.7 μM in a 6 point dose response curve (61.7 nM, 185.2 nM, 555.6 nM, 1666.7 nM, 5000.0 nM, and 15000.0 nM) in cultured in HepG2 cells when transfected using electroporation, whereas ISIS 445569 achieved an IC₅₀ of 2.3 μM. Thus, ISIS 598769, ISIS 598768, and ISIS 486178 are more potent than the comparator compound, ISIS 445569.

[0637] In certain embodiments, the compounds disclosed herein have greater activity than appropriate comparator compounds, such as ISIS 445569, at achieving dose-dependent inhibition of DMPK across multiple different muscle tissues. In another example, as provided in Example 16 (described herein), ISIS 598768 and ISIS 598769 achieved greater dose-dependent inhibition than the comparator compound ISIS 445569 across several different muscle tissues when administered subcutaneously to DMSXL transgenic mice twice a week for 4 weeks with 25 mg/kg/week, 50 mg/kg/wk, or 100 mg/kg/wk. In some muscle tissues, for example, in the tibialis anterior, both ISIS 598768 and ISIS 598769 achieved greater inhibition of DMPK at 25, 50 and 100 mg/kg/wk than ISIS 445569 achieved at 200 mg/kg/wk. In the quadriceps and gastrocnemius, both ISIS 598768 and ISIS 598769 achieved equal or greater inhibition of DMPK at 50 mg/kg/wk than ISIS 445569 achieved at 100 or 200 mg/kg/wk. Thus, ISIS 598768 and ISIS 598769 have greater activity than ISIS 445569 at achieving dose-dependent inhibition of DMPK across multiple different muscle tissues.

[0638] In certain embodiments, the compounds disclosed herein are more tolerable than appropriate comparator compounds, such as ISIS 445569, when administered to CD-1 mice. In another example, as provided in Example 17 (described herein), ISIS 598769, ISIS 598768, and ISIS 486178 exhibited more favorable tolerability markers than ISIS 445569 when administered to CD-1 mice. ISIS 598769, ISIS 598768, and ISIS 486178 were administered subcutaneously twice a week for 6 weeks at 50 mg/kg/wk. ISIS 445569 was administered subcutaneously twice a week for 6 weeks at 100 mg/kg/wk. After treatment, ALT, AST, and BUN levels were lower in ISIS 486178 and ISIS 598768 treated mice than in ISIS 445569 treated mice. After treatment, ALT and AST levels were lower in ISIS 598769 treated mice than in ISIS 445569 treated mice. Therefore, ISIS 598769, ISIS 598768, and ISIS 486178 are more tolerable than the comparator compound, ISIS 445569 in CD-1 mice.

[0639] In certain embodiments, the compounds disclosed herein are more tolerable than appropriate comparator compounds, such as ISIS 445569, when administered to Sprague-Dawley rats. In another example, as provided in Example 18 (described herein), ISIS 598769, ISIS 598768, and ISIS 486178 exhibited more favorable tolerability markers than ISIS 445569 when administered to Sprague-Dawley rats. ISIS 598769, ISIS 598768, and ISIS 486178 were administered subcutaneously twice a week for 6 weeks at 50 mg/kg/wk. ISIS 445569 was administered subcutaneously twice a week for 6 weeks at 100 mg/kg/wk. After treatment, ALT and AST levels were lower in ISIS 486178, ISIS 598769, and ISIS 598768 treated mice than in ISIS 445569 treated mice. Therefore ISIS 598769, ISIS 598768, and ISIS 486178 are more tolerable than the comparator compound, ISIS 445569 in Sprague-Dawley rats.

[0640] In certain embodiments, the compounds disclosed herein exhibit more favorable tolerability markers in cynomolgous monkeys than appropriate comparator compounds, such as ISIS 445569. In another example, as provided in Example 19 (described herein), ISIS 598769, ISIS 598768, and ISIS 486178 exhibited more favorable tolerability markers in cynomolgous monkeys including Alanine aminotransferase (ALT), aspartate aminotransferase (AST), lactate dehydrogenase (LDH), and creatine kinase (CK) assessment. In certain embodiments, ALT and AST levels are used as indicators of hepatotoxicity. For example, in certain embodiments, elevated ALT and AST levels indicate trauma to liver cells. In certain embodiments, elevated CK levels are associated with damage to cells in muscle tissue. In certain embodiments, elevated LDH levels are associated with cellular tissue damage.

[0641] In certain embodiments, the compounds disclosed herein are more tolerable than appropriate comparator compounds, such as ISIS 445569, when administered to cynomolgous monkeys. As provided in Example 19, groups of cynomolgous monkeys were treated with 40 mg/kg/wk of ISIS 598769, ISIS 598768, ISIS 486178, and ISIS 445569. Treatment with ISIS 445569 resulted in elevated ALT and AST levels at 93 days into treatment. Treatment with ISIS 598768, and ISIS 486178 resulted in lower ALT and AST levels at 58 and 93 days into treatment compared to ISIS 445569. Treatment with ISIS 598769, resulted in lower AST levels at 58 and 93 days into treatment and lower ALT levels at 93 days of treatment compared to ISIS 445569. Furthermore, the ALT and AST levels of monkeys receiving doses of ISIS 598769, ISIS 598768, and ISIS 486178 were consistent with the ALT and AST levels of monkeys given saline. Treatment with ISIS 445569 resulted in elevated LDH levels compared to the LDH levels measured in animals given ISIS 598769, ISIS 598768, and ISIS 486178 at 93 days into treatment. Additionally, treatment with ISIS 445569 resulted in elevated CK levels compared to the CK levels measured in animals given ISIS 598769, ISIS 598768, and ISIS 486178 at 93 days into treatment. Therefore, ISIS 598769, ISIS 598768, and ISIS 486178 are more tolerable than the comparator compound, ISIS 445569.

[0642] As the data discussed above demonstrate, ISIS 598769, ISIS 598768, and ISIS 486178 possess a wider range of well-tolerated doses at which ISIS 598769, ISIS 598768, and ISIS 486178 are active compared to the comparator compound, ISIS 445569. Additionally, the totality of the data presented in the examples herein and discussed above demonstrate that each of ISIS 598769, ISIS 598768, and ISIS 486178 possess a number of safety and activity advantages over the comparator compound, ISIS 445569. In other words, each of ISIS 598769, ISIS 598768, and ISIS 486178 are likely to be safer and more active drugs in humans than ISIS 445569.

[0643] In certain embodiments, ISIS 445569 is likely to be a safer and more active drug in humans for reducing CUGexp DMPK mRNA and\or treating conditions or symptoms associated with having myotonic dystrophy type 1 than the other compounds disclosed in WO 2012/012443 and/or WO 2012/012467.

[0644] In certain embodiments, ISIS 512497 has a better safety profile in primates and CD-1 mice than ISIS 445569. In certain embodiments, ISIS 512497 achieves greater knockdown of human DMPK nucleic acid in multiple muscle tissues when administered at the same dose and at lower doses than ISIS 445569.

[0645] In certain embodiments, ISIS 486178 has a better safety profile in mice, rats, and primates than ISIS 445569. In certain embodiments, ISIS 486178 achieves greater knockdown of human DMPK nucleic acid in one or more muscle tissues when administered at the same dose and at lower doses than ISIS 445569.

[0646] In certain embodiments, ISIS 570808 achieves much greater knockdown of human DMPK nucleic acid at least five different muscle tissues when administered at the same dose and at lower dose than ISIS 445569.

[0647] In certain embodiments, ISIS 594292 achieves greater knockdown of human DMPK nucleic acid in one or more muscle tissues when administered at the same dose as ISIS 445569. In certain embodiments, ISIS 486178 has a better safety profile in primates than ISIS 445569.

[0648] In certain embodiments, ISIS 569473 achieves greater knockdown of human DMPK nucleic acid in one or more muscle tissues when administered at the same dose as ISIS 445569. In certain embodiments, ISIS 569473 has a better safety profile in primates than ISIS 445569.

[0649] In certain embodiments, ISIS 594300 achieves greater knockdown of human DMPK nucleic acid in one or more muscle tissues when administered at the same dose as ISIS 445569. In certain embodiments, ISIS 594300 has a better safety profile in primates than ISIS 445569.

[0650] In certain embodiments, ISIS 598777 achieves greater knockdown of human DMPK nucleic acid in one or more muscle tissues when administered at the same dose as ISIS 445569. In certain embodiments, ISIS 598777 has a better safety profile in primates than ISIS 445569.

[0651] In certain embodiments, ISIS 598768 achieves greater knockdown of human DMPK nucleic acid in one or more muscle tissues when administered at the same dose as ISIS 445569. In certain embodiments, ISIS 598768 has a better safety profile in primates than ISIS 445569.

[0652] In certain embodiments, ISIS 598769 achieves greater knockdown of human DMPK nucleic acid in one or more muscle tissues when administered at the same dose as ISIS 445569. In certain embodiments, ISIS 598769 has a better safety profile in primates than ISIS 445569.

### Nonlimiting Disclosure and Incorporation by Reference

[0653] While certain compounds, compositions and methods described herein have been described with specificity in accordance with certain embodiments, the following examples serve only to illustrate the compounds described herein and are not intended to limit the same. Each of the references, GenBank accession numbers, and the like recited in the present application is incorporated herein by reference in its entirety.

[0654] Although the sequence listing accompanying this filing identifies each sequence as either “RNA” or “DNA” as required, in reality, those sequences may be modified with any combination of chemical modifications. One of skill in the art will readily appreciate that such designation as “RNA” or “DNA” to describe modified oligonucleotides is, in certain instances, arbitrary. For example, an oligonucleotide comprising a nucleoside comprising a 2′-OH sugar moiety and a thymine base could be described as a DNA having a modified sugar (2′-OH for the natural 2′-H of DNA) or as an RNA having a modified base (thymine (methylated uracil) for natural uracil of RNA).

[0655] Accordingly, nucleic acid sequences provided herein, including, but not limited to those in the sequence listing, are intended to encompass nucleic acids containing any combination of natural or modified RNA and/or DNA, including, but not limited to such nucleic acids having modified nucleobases. By way of further example and without limitation, an oligomeric compound having the nucleobase sequence “ATCGATCG” encompasses any oligomeric compounds having such nucleobase sequence, whether modified or unmodified, including, but not limited to, such compounds comprising RNA bases, such as those having sequence “AUCGAUCG” and those having some DNA bases and some RNA bases such as “AUCGATCG” and oligomeric compounds having other modified or naturally occurring bases, such as “AT^{me}CGAUCG,” wherein ^{me}C indicates a cytosine base comprising a methyl group at the 5-position.

### EXAMPLES

### Non-Limiting Disclosure and Incorporation by Reference

[0656] While certain compounds, compositions and methods described herein have been described with specificity in accordance with certain embodiments, the following examples serve only to illustrate the compounds described herein and are not intended to limit the same. Each of the references recited in the present application is incorporated herein by reference in its entirety.

### Example 1: Design of Antisense Oligonucleotides Targeting Human Dystrophia Myotonica Protein Kinase (hDMPK)

[0657] A series of antisense oligonucleotides (ASOs) were designed to target hDMPK. The newly designed ASOs were prepared using standard oligonucleotide synthesis well known in the art and are described in Tables 1 and 2, below. Subscripts “s” indicate phosphorothioate internucleoside linkages; subscripts “k” indicate 6′-(S)—CH₃ bicyclic nucleosides (cEt); subscripts “e” indicate 2′-O-methoxyethyl (MOE) modified nucleosides; and subscripts “d” indicate β-D-2′-deoxyribonucleosides. “mC” indicates 5-methylcytosine nucleosides.

[0658] The antisense oligonucleotides are targeted to either SEQ ID NO: 1 (GENBANK Accession No. NM_001081560.1) and/or SEQ ID NO: 2 (the complement of GENBANK Accession No. NT_011109.15 truncated from nucleotides 18540696 to 18555106). “Start site” indicates the 5′-most nucleoside to which the gapmer is targeted in the human gene sequence. “Stop site” indicates the 3′-most nucleoside to which the gapmer is targeted human gene sequence.

TABLE 1
Design of antisense oligonucleotides targeting hDMPK and targeted
to SEQ ID NO 2

| | | | | | | Unmodi- | Modi- |
|---|---|---|---|---|---|---|---|
| | | | | | | fied | fied |
| ISIS | | | | Start | Stop | SEQ ID | SEQ ID |
| No | Composition (5′ to 3′) | Motif | Length | Site | Site | No | No. |
| 486178 | Aₖₛ^{m}CₖₛAₖₛA_{ds}T_{ds}A_{ds}A_{ds}A_{ds} | kkk-10- | 16 | 13836 | 13851 | 23 | 881 |
| | T_{ds}A_{ds}^{m}C_{ds}^{m}C_{ds}G_{ds}AₖₛGₖₛGk | kkk | | | | | |
| 445569 | ^{m}CₑₛGₑₛGₑₛAₑₛGₑₛ^{m}C_{ds}G_{ds}G_{ds}T_{ds}T_{ds}G_{ds} | e5-d10- | 20 | 13226 | 13245 | 24 | 1443 |
| | T_{ds}G_{ds}A_{ds}A_{ds}^{m}CₑₛTₑₛGₑₛGₑₛ^{m}Cₑ | e5 | | | | | |
| 512497 | Gₑₛ^{m}CₑₛGₑₛ^{m}Cₑₛ^{m}AₑₛC_{ds}^{m}C_{ds}T_{ds}T_{ds}^{m}C_{ds} | e5-d10- | 20 | 8608 | 8627 | 25 | 1444 |
| | ^{m}C_{ds}^{m}C_{ds}G_{ds}A_{ds}A_{ds}TₑₛGₑₛTₑₛ^{m}Cₑₛ^{m}Cₑ | e5 | | | | | |
| 598768 | ^{m}Cₑₛ^{m}Cₑₛ^{m}CₖₛGₖₛA_{ds}A_{ds}T_{ds}G_{ds} | eekk-d8- | 16 | 8603 | 8618 | 26 | 1342 |
| | T_{ds}^{m}C_{ds}^{m}C_{ds}G_{ds}Aₖₛ^{m}CₖₛAₑₛGₑ | kkee | | | | | |
| 594300 | ^{m}CₑₛGₑₛGₑₛAₖₛGₖₛ^{m}C_{ds}G_{ds}G_{ds} | eeekk- | 17 | 13229 | 13245 | 27 | 1441 |
| | T_{ds}T_{ds}G_{ds}T_{ds}GₖₛAₖₛAₑₛ^{m}CₑₛTₑ | d7-kkeee | | | | | |
| 594292 | Aₑₛ^{m}CₑₛAₑₛAₖₛTₖₛA_{ds}A_{ds}A_{ds}T_{ds} | eeekk- | 17 | 13835 | 13851 | 28 | 1442 |
| | A_{ds}^{m}C_{ds}^{m}C_{ds}GₖₛAₖₛGₑₛGₑₛAₑ | d7-kkeee | | | | | |
| 569473 | GₖₛAₖₛ^{m}CₖₛA_{ds}A_{ds}T_{ds}^{m}C_{ds}T_{ds} | kkk-d10- | 16 | 5082 | 5097 | 29 | 882 |
| | ^{m}C_{ds}^{m}C_{ds}G_{ds}^{m}C_{ds}^{m}C_{ds}AₖₛGₖₛGₖ | kkk | | | | | |
| 598769 | Tₑₛ^{m}Cₑₛ^{m}Cₖₛ^{m}CₖₛG_{ds}A_{ds}A_{ds}T_{ds} | eekk-d8- | 16 | 8604 | 8619 | 30 | 1343 |
| | G_{ds}T_{ds}^{m}C_{ds}^{m}C_{ds}GₖₛAₖₛ^{m}CₑₛAₑ | kkee | | | | | |
| 570808 | TₖₛGₖₛTₖₛA_{ds}A_{ds}T_{ds}G_{ds}T_{ds} | kkk-d10- | 16 | 10201 | 10216 | 31 | 883 |
| | T_{ds}G_{ds}T_{ds}^{m}C_{ds}^{m}C_{ds}AₖₛGₖₛTₖ | kkk | | | | | |
| 598777 | GₑₛTₑₛGₖₛTₖₛA_{ds}A_{ds}T_{ds}G_{ds} | eekk-d8- | 16 | 10202 | 10217 | 32 | 1344 |
| | T_{ds}T_{ds}G_{ds}T_{ds}^{m}Cₖₛ^{m}CₖₛAₑₛGₑ | kkee | | | | | |

TABLE 2
Design of antisense oligonucleotides targeting hDMPK and targeted
to SEQ ID NO 1

| ISIS | | | | Start | Stop |
|---|---|---|---|---|---|
| No. | Composition (5′ to 3′) | Motif | Length | Site | Site |
| 486178 | Aₖₛ^{m}CₖₛAₖₛA_{ds}T_{ds}A_{ds}A_{ds}A_{ds} | kkk-10-kkk | 16 | 2773 | 2788 |
| | T_{ds}^{m}A_{ds}^{m}C_{ds}^{m}C_{ds}G_{ds}AₖₛGₖₛGₖ | | | | |
| 445569 | CₑₛGₑₛGₑₛAₑₛGₑₛ^{m}C_{ds}G_{ds}G_{ds}T_{ds}T_{ds}G_{ds} | e5-d10-e5 | 20 | 2163 | 2182 |
| | T_{ds}G_{ds}A_{ds}A_{ds}^{m}CₑₛTₑₛGₑₛGₑₛ^{m}Cₑ | | | | |
| 512497 | Gₑₛ^{m}CₑₛGₑₛ^{m}CₑₛAₑₛ^{m}C_{ds}^{m}C_{ds}T_{ds}T_{ds}^{m}C_{ds} | e5-d10-e5 | 20 | 1348 | 1367 |
| | ^{m}C_{ds}^{m}C_{ds}G_{ds}A_{ds}A_{ds}TₑₛGₑₛTₑₛ^{m}Cₑₛ^{m}Cₑ | | | | |
| 598768 | ^{m}Cₑₛ^{m}Cₑₛ^{m}CₖₛGₖₛA_{ds}A_{ds}T_{ds}G_{ds} | eekk-d8-kkee | 16 | 1343 | 1358 |
| | T_{ds}^{m}C_{ds}^{m}C_{ds}G_{ds}Aₖₛ^{m}CₖₛAₑₛGₑ | | | | |
| 594300 | ^{m}CₑₛGₑₛGₑₛAₖₛGₖₛ^{m}C_{ds}G_{ds}G_{ds} | eeekk-d7-kkeee | 17 | 2166 | 2182 |
| | T_{ds}T_{ds}G_{ds}T_{ds}GₖₛAₖₛAₑₛ^{m}CₑₛTₑ | | | | |
| 594292 | Aₑₛ^{m}CₑₛAₑₛAₖₛTₖₛA_{ds}A_{ds}A_{ds}T_{ds} | eeekk-d7-kkeee | 17 | 2772 | 2788 |
| | A_{ds}^{m}C_{ds}^{m}C_{ds}GₖₛAₖₛGₑₛGₑₛAₑ | | | | |
| 569473 | GₖₛAₖₛ^{m}CₖₛA_{ds}A_{ds}T_{ds}^{m}C_{ds}T_{ds} | kkk-d10-kkk | 16 | 730 | 745 |
| | ^{m}C_{ds}^{m}C_{ds}G_{ds}^{m}C_{ds}^{m}C_{ds}AₖₛGₖₛGₖ | | | | |
| 598769 | Tₑₛ^{m}Cₑₛ^{m}Cₖₛ^{m}CₖₛG_{ds}A_{ds}A_{ds}T_{ds} | eekk-d8-kkee | 16 | 1344 | 1359 |
| | G_{ds}T_{ds}^{m}C_{ds}^{m}C_{ds}GₖₛAₖₛ^{m}CₑₛAₑ | | | | |

### Example 2: Antisense Inhibition of Human DMPK in Human Skeletal Muscle Cells (hSKMc)

[0659] Antisense oligonucleotides targeted to a human DMPK nucleic acid were tested for their effect on DMPK RNA transcript in vitro. Cultured hSKMc cells at a density of 20,000 cells per well were transfected using electroporation with 10,000 nM antisense oligonucleotide. After approximately 24 hours, RNA was isolated from the cells and DMPK transcript levels were measured by quantitative real-time PCR. DMPK RNA transcript levels were adjusted according to total RNA content, as measured by RIBOGREEN®. Results are presented as percent expression of DMPK, relative to untreated control cells.

[0660] The antisense oligonucleotides in Tables 3, 4, 5, and 6 are 5-10-5 gapmers, where the gap segment comprises ten 2′-deoxynucleosides and each wing segment comprises five 2′-MOE nucleosides. The internucleoside linkages throughout each gapmer are phosphorothioate (P═S) linkages. All cytsoine residues throughout each gapmer are 5-methylcytosines. ‘Target start site’ indicates the 5′-most nucleoside to which the antisense oligonucleotide is targeted in the human genomic gene sequence. ‘Target stop site’ indicates the 3′-most nucleoside to which the antisense oligonucleotide is targeted in the human genomic sequence. All the antisense oligonucleotides listed in Table 3, 4, or 5 target SEQ ID NO: 1 (GENBANK Accession No. NM_001081560.1). All the antisense oligonucleotides listed in Table 6 target SEQ ID NO: 2 (the complement of GENBANK Accession No. NT_011109.15 truncated from nucleotides 18540696 to 18555106).

[0661] Several of the antisense oligonucleotides in Tables 2, 3, 4, and 5 demonstrated significant inhibition of DMPK mRNA levels under the conditions specified above.

TABLE 3
Inhibition of human DMPK RNA transcript in hSKMc by 5-10-5 gapmers targeting
SEQ ID NO: 1

| | | | Start Site | Stop Site | SEQ |
|---|---|---|---|---|---|
| ISIS | | % Target | on Seq ID: | on Seq | ID |
| No. | Sequence | Expression | 1 | ID: 1 | NO. |
| UTC | N/A | 100.0 | N/A | N/A | 33 |
| 444401 | TTGCACTTTGCGAACCAACG | 7.3 | 2490 | 2509 | 34 |
| 512326 | CGACACCTCGCCCCTCTTCA | 13.4 | 528 | 547 | 35 |
| 512327 | ACGACACCTCGCCCCTCTTC | 40.8 | 529 | 548 | 36 |
| 512328 | CACGACACCTCGCCCCTCTT | 27.8 | 530 | 549 | 37 |
| 512329 | GCACGACACCTCGCCCCTCT | 16.5 | 531 | 550 | 38 |
| 512330 | AGCACGACACCTCGCCCCTC | 17.9 | 532 | 551 | 39 |
| 512331 | AAGCACGACACCTCGCCCCT | 18.8 | 533 | 552 | 40 |
| 512332 | GAAGCACGACACCTCGCCCC | 23.3 | 534 | 553 | 41 |
| 512333 | GGAAGCACGACACCTCGCCC | 28.1 | 535 | 554 | 42 |
| 512334 | CGGAAGCACGACACCTCGCC | 16.3 | 536 | 555 | 43 |
| 512335 | ACGGAAGCACGACACCTCGC | 28.7 | 537 | 556 | 44 |
| 512336 | CACGGAAGCACGACACCTCG | 15.9 | 538 | 557 | 45 |
| 512337 | TCACGGAAGCACGACACCTC | 18.8 | 539 | 558 | 46 |
| 512338 | CTCACGGAAGCACGACACCT | 16.4 | 540 | 559 | 47 |
| 512339 | CCTCACGGAAGCACGACACC | 20.2 | 541 | 560 | 48 |
| 512340 | TCCTCACGGAAGCACGACAC | 19.3 | 542 | 561 | 49 |
| 512341 | CTCCTCACGGAAGCACGACA | 15.2 | 543 | 562 | 50 |
| 512342 | TCTCCTCACGGAAGCACGAC | 16.2 | 544 | 563 | 51 |
| 512343 | CTCTCCTCACGGAAGCACGA | 16.4 | 545 | 564 | 52 |
| 512344 | CCTCTCCTCACGGAAGCACG | 15.7 | 546 | 565 | 53 |
| 512345 | CCCTCTCCTCACGGAAGCAC | 14.7 | 547 | 566 | 54 |
| 512346 | TCCCTCTCCTCACGGAAGCA | 20.6 | 548 | 567 | 55 |
| 512347 | GTCCCTCTCCTCACGGAAGC | 32.6 | 549 | 568 | 56 |
| 512348 | CGTCCCTCTCCTCACGGAAG | 31.5 | 550 | 569 | 57 |
| 512349 | GGTCCCCATTCACCAACACG | 41.6 | 568 | 587 | 58 |
| 512350 | CGGTCCCCATTCACCAACAC | 31.6 | 569 | 588 | 59 |
| 512351 | CCGGTCCCCATTCACCAACA | 38.1 | 570 | 589 | 60 |
| 512352 | GCCGGTCCCCATTCACCAAC | 55.5 | 571 | 590 | 61 |
| 512353 | CGCCGGTCCCCATTCACCAA | 42.9 | 572 | 591 | 62 |
| 512354 | CCGCCGGTCCCCATTCACCA | 35.7 | 573 | 592 | 63 |
| 512355 | ACCGCCGGTCCCCATTCACC | 51.4 | 574 | 593 | 64 |
| 512356 | CACCGCCGGTCCCCATTCAC | 34.4 | 575 | 594 | 65 |
| 512357 | CCACCGCCGGTCCCCATTCA | 40.4 | 576 | 595 | 66 |
| 512358 | TCCACCGCCGGTCCCCATTC | 35.5 | 577 | 596 | 67 |
| 512359 | ATCCACCGCCGGTCCCCATT | 41.7 | 578 | 597 | 68 |
| 512360 | GATCCACCGCCGGTCCCCAT | 51.0 | 579 | 598 | 69 |
| 512361 | TGATCCACCGCCGGTCCCCA | 35.9 | 580 | 599 | 70 |
| 512362 | GTGATCCACCGCCGGTCCCC | 53.2 | 581 | 600 | 71 |
| 512363 | CGTGATCCACCGCCGGTCCC | 28.2 | 582 | 601 | 72 |
| 512364 | TTCTCATCCTGGAAGGCGAA | 34.6 | 611 | 630 | 73 |
| 512365 | GTTCTCATCCTGGAAGGCGA | 57.1 | 612 | 631 | 74 |
| 512366 | AGTTCTCATCCTGGAAGGCG | 72.1 | 613 | 632 | 75 |
| 512367 | GTAGTTCTCATCCTGGAAGG | 47.1 | 615 | 634 | 76 |
| 512368 | GGTAGTTCTCATCCTGGAAG | 56.0 | 616 | 635 | 77 |
| 512369 | AGGTAGTTCTCATCCTGGAA | 48.3 | 617 | 636 | 78 |
| 512370 | CAGGTAGTTCTCATCCTGGA | 20.2 | 618 | 637 | 79 |
| 512371 | TACAGGTAGTTCTCATCCTG | 44.0 | 620 | 639 | 80 |
| 512372 | GTACAGGTAGTTCTCATCCT | 64.1 | 621 | 640 | 81 |
| 512373 | GGTACAGGTAGTTCTCATCC | 54.2 | 622 | 641 | 82 |
| 512374 | AGGTACAGGTAGTTCTCATC | 65.6 | 623 | 642 | 83 |
| 512375 | CCAGGTACAGGTAGTTCTCA | 45.7 | 625 | 644 | 84 |
| 512376 | ACCAGGTACAGGTAGTTCTC | 60.4 | 626 | 645 | 85 |
| 512377 | GACCAGGTACAGGTAGTTCT | 62.2 | 627 | 646 | 86 |
| 512378 | TGACCAGGTACAGGTAGTTC | 64.9 | 628 | 647 | 87 |
| 512379 | CATGACCAGGTACAGGTAGT | 39.2 | 630 | 649 | 88 |
| 512380 | CCATGACCAGGTACAGGTAG | 27.7 | 631 | 650 | 89 |
| 512381 | TCCATGACCAGGTACAGGTA | 21.6 | 632 | 651 | 90 |
| 512382 | CTCCATGACCAGGTACAGGT | 25.7 | 633 | 652 | 91 |
| 512383 | ACTCCATGACCAGGTACAGG | 28.6 | 634 | 653 | 92 |
| 512384 | TACTCCATGACCAGGTACAG | 23.7 | 635 | 654 | 93 |
| 512385 | ATACTCCATGACCAGGTACA | 20.8 | 636 | 655 | 94 |
| 512386 | AATACTCCATGACCAGGTAC | 22.0 | 637 | 656 | 95 |
| 512387 | TAATACTCCATGACCAGGTA | 14.7 | 638 | 657 | 96 |
| 512388 | CGTAATACTCCATGACCAGG | 10.4 | 640 | 659 | 97 |
| 512389 | AGCAGTGTCAGCAGGTCCCC | 15.0 | 665 | 684 | 98 |
| 512390 | CAGCAGTGTCAGCAGGTCCC | 13.0 | 666 | 685 | 99 |
| 512391 | TCAGCAGTGTCAGCAGGTCC | 22.3 | 667 | 686 | 100 |
| 512392 | CTCAGCAGTGTCAGCAGGTC | 16.4 | 668 | 687 | 101 |
| 512393 | GCTCAGCAGTGTCAGCAGGT | 22.2 | 669 | 688 | 102 |
| 512394 | TGCTCAGCAGTGTCAGCAGG | 26.2 | 670 | 689 | 103 |
| 512395 | TTGCTCAGCAGTGTCAGCAG | 27.4 | 671 | 690 | 104 |
| 512396 | CTTGCTCAGCAGTGTCAGCA | 15.7 | 672 | 691 | 105 |
| 512397 | ACTTGCTCAGCAGTGTCAGC | 43.5 | 673 | 692 | 106 |
| 512398 | AACTTGCTCAGCAGTGTCAG | 26.9 | 674 | 693 | 107 |
| 512399 | AAACTTGCTCAGCAGTGTCA | 20.0 | 675 | 694 | 108 |
| 512400 | CAAACTTGCTCAGCAGTGTC | 23.1 | 676 | 695 | 109 |
| 512401 | CCAAACTTGCTCAGCAGTGT | 20.5 | 677 | 696 | 110 |
| 512402 | CCCAAACTTGCTCAGCAGTG | 13.5 | 678 | 697 | 33 |

TABLE 4
Inhibition of human DMPK RNA transcript in hSKMc by 5-10-5 gapmers
targeting SEQ ID NO: 1

| | | | Start Site | Stop Site | SEQ |
|---|---|---|---|---|---|
| ISIS | | % Target | on Seq ID: | on Seq | ID |
| No. | Sequence | Expression | 1 | ID: 1 | NO. |
| UTC | N/A | 100 | N/A | N/A | |
| 444401 | TTGCACTTTGCGAACCAACG | 13.4 | 2490 | 2509 | 33 |
| 512480 | GTGAGCCCGTCCTCCACCAA | 29.8 | 1310 | 1329 | 111 |
| 512481 | AGTGAGCCCGTCCTCCACCA | 15.6 | 1311 | 1330 | 112 |
| 512482 | CAGTGAGCCCGTCCTCCACC | 10.7 | 1312 | 1331 | 113 |
| 512483 | GCAGTGAGCCCGTCCTCCAC | 33.3 | 1313 | 1332 | 114 |
| 512484 | GGCAGTGAGCCCGTCCTCCA | 9.6 | 1314 | 1333 | 115 |
| 512485 | TGGCAGTGAGCCCGTCCTCC | 8.8 | 1315 | 1334 | 116 |
| 512486 | CATGGCAGTGAGCCCGTCCT | 10.5 | 1317 | 1336 | 117 |
| 512487 | CCATGGCAGTGAGCCCGTCC | 10.1 | 1318 | 1337 | 118 |
| 512488 | TCCATGGCAGTGAGCCCGTC | 13.7 | 1319 | 1338 | 119 |
| 512489 | CTCCATGGCAGTGAGCCCGT | 16.9 | 1320 | 1339 | 120 |
| 512490 | TCTCCATGGCAGTGAGCCCG | 29.1 | 1321 | 1340 | 121 |
| 512491 | GTCTCCATGGCAGTGAGCCC | 41.3 | 1322 | 1341 | 122 |
| 512492 | CCTTCCCGAATGTCCGACAG | 8.8 | 1343 | 1362 | 123 |
| 512493 | ACCTTCCCGAATGTCCGACA | 12.1 | 1344 | 1363 | 124 |
| 512494 | CACCTTCCCGAATGTCCGAC | 6 | 1345 | 1364 | 125 |
| 512495 | GCACCTTCCCGAATGTCCGA | 8.5 | 1346 | 1365 | 126 |
| 512496 | CGCACCTTCCCGAATGTCCG | 5.6 | 1347 | 1366 | 127 |
| 512497 | GCGCACCTTCCCGAATGTCC | 7.7 | 1348 | 1367 | 25 |
| 512498 | GGCGCACCTTCCCGAATGTC | 15 | 1349 | 1368 | 128 |
| 512499 | ACAAAAGGCAGGTGGACCCC | 22.8 | 1373 | 1392 | 129 |
| 512500 | CACAAAAGGCAGGTGGACCC | 22 | 1374 | 1393 | 130 |
| 512501 | CCACAAAAGGCAGGTGGACC | 16.4 | 1375 | 1394 | 131 |
| 512502 | CCCACAAAAGGCAGGTGGAC | 15.8 | 1376 | 1395 | 132 |
| 512503 | GCCCACAAAAGGCAGGTGGA | 25.1 | 1377 | 1396 | 133 |
| 512504 | AGCCCACAAAAGGCAGGTGG | 24.7 | 1378 | 1397 | 134 |
| 512505 | TAGCCCACAAAAGGCAGGTG | 20.7 | 1379 | 1398 | 135 |
| 512506 | GTAGCCCACAAAAGGCAGGT | 20.7 | 1380 | 1399 | 136 |
| 512507 | AGTAGCCCACAAAAGGCAGG | 27.8 | 1381 | 1400 | 137 |
| 512508 | GAGTAGCCCACAAAAGGCAG | 43.9 | 1382 | 1401 | 138 |
| 512509 | GGAGTAGCCCACAAAAGGCA | 29.9 | 1383 | 1402 | 139 |
| 512510 | AGGAGTAGCCCACAAAAGGC | 31.9 | 1384 | 1403 | 140 |
| 512511 | TAGGAGTAGCCCACAAAAGG | 59.9 | 1385 | 1404 | 141 |
| 512512 | GTAGGAGTAGCCCACAAAAG | 40.1 | 1386 | 1405 | 142 |
| 512513 | AGTAGGAGTAGCCCACAAAA | 48.1 | 1387 | 1406 | 143 |
| 512514 | GAGTAGGAGTAGCCCACAAA | 53.3 | 1388 | 1407 | 144 |
| 512515 | GGAGTAGGAGTAGCCCACAA | 24.7 | 1389 | 1408 | 145 |
| 512516 | AGGAGTAGGAGTAGCCCACA | 22.1 | 1390 | 1409 | 146 |
| 512517 | CAGGAGTAGGAGTAGCCCAC | 15.4 | 1391 | 1410 | 147 |
| 512518 | GCAGGAGTAGGAGTAGCCCA | 32.8 | 1392 | 1411 | 148 |
| 512519 | TGCAGGAGTAGGAGTAGCCC | 37.6 | 1393 | 1412 | 149 |
| 512520 | ATGCAGGAGTAGGAGTAGCC | 47.4 | 1394 | 1413 | 150 |
| 512521 | CATGCAGGAGTAGGAGTAGC | 67.2 | 1395 | 1414 | 151 |
| 512522 | CCATGCAGGAGTAGGAGTAG | 58.8 | 1396 | 1415 | 152 |
| 512523 | GCCATGCAGGAGTAGGAGTA | 42.4 | 1397 | 1416 | 153 |
| 512524 | GGCCATGCAGGAGTAGGAGT | 34.1 | 1398 | 1417 | 154 |
| 512525 | GGGCCATGCAGGAGTAGGAG | 44.5 | 1399 | 1418 | 155 |
| 512526 | AGGGCCATGCAGGAGTAGGA | 42 | 1400 | 1419 | 156 |
| 512527 | GAGGGCCATGCAGGAGTAGG | 46.3 | 1401 | 1420 | 157 |
| 512528 | CTGAGGGCCATGCAGGAGTA | 25.3 | 1403 | 1422 | 158 |
| 512529 | CCTGAGGGCCATGCAGGAGT | 28.1 | 1404 | 1423 | 159 |
| 512530 | CCCTGAGGGCCATGCAGGAG | 22.8 | 1405 | 1424 | 160 |
| 512531 | TCCCTGAGGGCCATGCAGGA | 25.7 | 1406 | 1425 | 161 |
| 512532 | GTCCCTGAGGGCCATGCAGG | 17 | 1407 | 1426 | 162 |
| 512533 | TGTCCCTGAGGGCCATGCAG | 18.9 | 1408 | 1427 | 163 |
| 512534 | CTGTCCCTGAGGGCCATGCA | 27.3 | 1409 | 1428 | 164 |
| 512535 | ACTGTCCCTGAGGGCCATGC | 16.5 | 1410 | 1429 | 165 |
| 512536 | CACTGTCCCTGAGGGCCATG | 26 | 1411 | 1430 | 166 |
| 512537 | TCACTGTCCCTGAGGGCCAT | 22.7 | 1412 | 1431 | 167 |
| 512538 | CTCACTGTCCCTGAGGGCCA | 20.2 | 1413 | 1432 | 168 |
| 512539 | CCTCACTGTCCCTGAGGGCC | 19.3 | 1414 | 1433 | 169 |
| 512540 | ACCTCACTGTCCCTGAGGGC | 31 | 1415 | 1434 | 170 |
| 512541 | GACCTCACTGTCCCTGAGGG | 51.4 | 1416 | 1435 | 171 |
| 512542 | GGACCTCACTGTCCCTGAGG | 28 | 1417 | 1436 | 172 |
| 512543 | GGGACCTCACTGTCCCTGAG | 42.6 | 1418 | 1437 | 173 |
| 512544 | CCTCCAGTTCCATGGGTGTG | 16.7 | 1444 | 1463 | 174 |
| 512545 | GCCTCCAGTTCCATGGGTGT | 21.9 | 1445 | 1464 | 175 |
| 512546 | GGCCTCCAGTTCCATGGGTG | 19 | 1446 | 1465 | 176 |
| 512547 | CGGCCTCCAGTTCCATGGGT | 14.9 | 1447 | 1466 | 177 |
| 512548 | TCGGCCTCCAGTTCCATGGG | 23 | 1448 | 1467 | 178 |
| 512549 | CTCGGCCTCCAGTTCCATGG | 15.7 | 1449 | 1468 | 179 |
| 512550 | GCTCGGCCTCCAGTTCCATG | 16.2 | 1450 | 1469 | 180 |
| 512551 | TGCTCGGCCTCCAGTTCCAT | 17.7 | 1451 | 1470 | 181 |
| 512552 | CTGCTCGGCCTCCAGTTCCA | 18.4 | 1452 | 1471 | 182 |
| 512553 | GCTGCTCGGCCTCCAGTTCC | 22 | 1453 | 1472 | 183 |
| 512554 | AGCTGCTCGGCCTCCAGTTC | 32.4 | 1454 | 1473 | 184 |
| 512555 | CAGCTGCTCGGCCTCCAGTT | 15.7 | 1455 | 1474 | 185 |
| 512556 | GCAGCTGCTCGGCCTCCAGT | 16.3 | 1456 | 1475 | 186 |

TABLE 5
Inhibition of human DMPK RNA transcript in hSKMc by 5-10-5 gapmers targeting
SEQ ID NO: 1

| | | | Start Site | Stop Site | SEQ |
|---|---|---|---|---|---|
| ISIS | | % Target | on Seq ID: | on Seq | ID |
| No. | Sequence | Expression | 1 | ID: 1 | NO. |
| UTC | N/A | 100.0 | N/A | N/A | |
| 444401 | TTGCACTTTGCGAACCAACG | 7.0 | 2490 | 2509 | 33 |
| 512557 | AGCAGCTGCTCGGCCTCCAG | 25.2 | 1457 | 1476 | 187 |
| 512558 | AAGCAGCTGCTCGGCCTCCA | 16.1 | 1458 | 1477 | 188 |
| 512559 | CAAGCAGCTGCTCGGCCTCC | 21.9 | 1459 | 1478 | 189 |
| 512560 | TCAAGCAGCTGCTCGGCCTC | 24.8 | 1460 | 1479 | 190 |
| 512561 | CTCAAGCAGCTGCTCGGCCT | 19.8 | 1461 | 1480 | 191 |
| 512562 | GCTCAAGCAGCTGCTCGGCC | 11.6 | 1462 | 1481 | 192 |
| 512563 | GGCTCAAGCAGCTGCTCGGC | 19.8 | 1463 | 1482 | 193 |
| 512564 | TGGCTCAAGCAGCTGCTCGG | 31.9 | 1464 | 1483 | 194 |
| 512565 | GTGGCTCAAGCAGCTGCTCG | 27.5 | 1465 | 1484 | 195 |
| 512566 | TGTGGCTCAAGCAGCTGCTC | 35.4 | 1466 | 1485 | 196 |
| 512567 | GTGTGGCTCAAGCAGCTGCT | 24.8 | 1467 | 1486 | 197 |
| 512568 | CCACTTCAGCTGTTTCATCC | 43.1 | 1525 | 1544 | 198 |
| 512569 | TGCCACTTCAGCTGTTTCAT | 35.0 | 1527 | 1546 | 199 |
| 512570 | CTGCCACTTCAGCTGTTTCA | 27.8 | 1528 | 1547 | 200 |
| 512571 | ACTGCCACTTCAGCTGTTTC | 78.9 | 1529 | 1548 | 201 |
| 512572 | AACTGCCACTTCAGCTGTTT | 36.4 | 1530 | 1549 | 202 |
| 512573 | GAACTGCCACTTCAGCTGTT | 30.3 | 1531 | 1550 | 203 |
| 512574 | GGAACTGCCACTTCAGCTGT | 66.7 | 1532 | 1551 | 204 |
| 512575 | TGGAACTGCCACTTCAGCTG | 22.6 | 1533 | 1552 | 205 |
| 512576 | CTGGAACTGCCACTTCAGCT | 22.9 | 1534 | 1553 | 206 |
| 512577 | GCTGGAACTGCCACTTCAGC | 59.5 | 1535 | 1554 | 207 |
| 512578 | CGCTGGAACTGCCACTTCAG | 24.9 | 1536 | 1555 | 208 |
| 512579 | CCGCTGGAACTGCCACTTCA | 42.5 | 1537 | 1556 | 209 |
| 512580 | GCCGCTGGAACTGCCACTTC | 20.0 | 1538 | 1557 | 210 |
| 512581 | AGCCGCTGGAACTGCCACTT | 19.4 | 1539 | 1558 | 211 |
| 512582 | CTCAGCCTCTGCCGCAGGGA | 22.1 | 1560 | 1579 | 212 |
| 512583 | CCTCAGCCTCTGCCGCAGGG | 33.7 | 1561 | 1580 | 213 |
| 512584 | GGCCTCAGCCTCTGCCGCAG | 24.6 | 1563 | 1582 | 214 |
| 512585 | CGGCCTCAGCCTCTGCCGCA | 55.1 | 1564 | 1583 | 215 |
| 512586 | TCGGCCTCAGCCTCTGCCGC | 60.8 | 1565 | 1584 | 216 |
| 512587 | CTCGGCCTCAGCCTCTGCCG | 31.8 | 1566 | 1585 | 217 |
| 512588 | CCTCGGCCTCAGCCTCTGCC | 16.4 | 1567 | 1586 | 218 |
| 512589 | ACCTCGGCCTCAGCCTCTGC | 31.1 | 1568 | 1587 | 219 |
| 512590 | CACCTCGGCCTCAGCCTCTG | 39.7 | 1569 | 1588 | 220 |
| 512591 | TCACCTCGGCCTCAGCCTCT | 24.8 | 1570 | 1589 | 221 |
| 512592 | GTCACCTCGGCCTCAGCCTC | 28.7 | 1571 | 1590 | 222 |
| 512593 | CGTCACCTCGGCCTCAGCCT | 20.3 | 1572 | 1591 | 223 |
| 512594 | AGCACCTCCTCCTCCAGGGC | 18.4 | 1610 | 1629 | 224 |
| 512595 | GAGCACCTCCTCCTCCAGGG | 19.9 | 1611 | 1630 | 225 |
| 512596 | TGAGCACCTCCTCCTCCAGG | 15.6 | 1612 | 1631 | 226 |
| 512597 | GTGAGCACCTCCTCCTCCAG | 22.3 | 1613 | 1632 | 227 |
| 512598 | GGTGAGCACCTCCTCCTCCA | 19.4 | 1614 | 1633 | 228 |
| 512599 | GGGTGAGCACCTCCTCCTCC | 17.3 | 1615 | 1634 | 229 |
| 512600 | CGGGTGAGCACCTCCTCCTC | 12.2 | 1616 | 1635 | 230 |
| 512601 | CCGGGTGAGCACCTCCTCCT | 15.9 | 1617 | 1636 | 231 |
| 512602 | GCCGGGTGAGCACCTCCTCC | 15.7 | 1618 | 1637 | 232 |
| 512603 | TGCCGGGTGAGCACCTCCTC | 15.1 | 1619 | 1638 | 233 |
| 512604 | CTGCCGGGTGAGCACCTCCT | 24.5 | 1620 | 1639 | 234 |
| 512605 | TCTGCCGGGTGAGCACCTCC | 33.8 | 1621 | 1640 | 235 |
| 512606 | GCTCTGCCGGGTGAGCACCT | 26.1 | 1623 | 1642 | 236 |
| 512607 | GGCTCTGCCGGGTGAGCACC | 50.4 | 1624 | 1643 | 237 |
| 512608 | AGGCTCTGCCGGGTGAGCAC | 42.9 | 1625 | 1644 | 238 |
| 512609 | CAGGCTCTGCCGGGTGAGCA | 39.2 | 1626 | 1645 | 239 |
| 512610 | TCAGGCTCTGCCGGGTGAGC | 20.2 | 1627 | 1646 | 240 |
| 512611 | GCTCAGGCTCTGCCGGGTGA | 22.5 | 1629 | 1648 | 241 |
| 512612 | CGGCTCAGGCTCTGCCGGGT | 27.0 | 1631 | 1650 | 242 |
| 512613 | CCGGCTCAGGCTCTGCCGGG | 68.8 | 1632 | 1651 | 243 |
| 512614 | CCCGGCTCAGGCTCTGCCGG | 58.8 | 1633 | 1652 | 244 |
| 512615 | TCCCGGCTCAGGCTCTGCCG | 24.8 | 1634 | 1653 | 245 |
| 512616 | CTCCCGGCTCAGGCTCTGCC | 10.4 | 1635 | 1654 | 246 |
| 512617 | TCTCCCGGCTCAGGCTCTGC | 12.8 | 1636 | 1655 | 247 |
| 512618 | ATCTCCCGGCTCAGGCTCTG | 13.3 | 1637 | 1656 | 248 |
| 512619 | CATCTCCCGGCTCAGGCTCT | 7.7 | 1638 | 1657 | 249 |
| 512620 | CCATCTCCCGGCTCAGGCTC | 2.8 | 1639 | 1658 | 250 |
| 512621 | TCCATCTCCCGGCTCAGGCT | 2.6 | 1640 | 1659 | 251 |
| 512622 | CTCCATCTCCCGGCTCAGGC | 1.5 | 1641 | 1660 | 252 |
| 512623 | CCTCCATCTCCCGGCTCAGG | 1.4 | 1642 | 1661 | 253 |
| 512624 | GCCTCCATCTCCCGGCTCAG | 2.0 | 1643 | 1662 | 254 |
| 512625 | GGCCTCCATCTCCCGGCTCA | 8.3 | 1644 | 1663 | 255 |
| 512626 | TGGCCTCCATCTCCCGGCTC | 9.4 | 1645 | 1664 | 256 |
| 512627 | ATGGCCTCCATCTCCCGGCT | 6.3 | 1646 | 1665 | 257 |
| 512628 | GATGGCCTCCATCTCCCGGC | 2.7 | 1647 | 1666 | 258 |
| 512629 | GGATGGCCTCCATCTCCCGG | 1.3 | 1648 | 1667 | 259 |
| 512630 | CGGATGGCCTCCATCTCCCG | 1.5 | 1649 | 1668 | 260 |
| 512631 | GCGGATGGCCTCCATCTCCC | 2.4 | 1650 | 1669 | 261 |
| 512632 | TGCGGATGGCCTCCATCTCC | 2.2 | 1651 | 1670 | 262 |
| 512633 | GTTCCGAGCCTCTGCCTCGC | 29.2 | 1701 | 1720 | 263 |

TABLE 6
Inhibition of human DMPK RNA transcript in hSKMc by 5-10-5 gapmers targeting
SEQ ID NO: 2

| | | | Start Site | Stop Site | SEQ |
|---|---|---|---|---|---|
| ISIS | | % Target | on Seq ID: | on Seq | ID |
| No. | Sequence | Expression | 2 | ID: 2 | NO. |
| UTC | N/A | 100.0 | N/A | N/A | |
| 444401 | TTGCACTTTGCGAACCAACG | 7.0 | 13553 | 13572 | 33 |
| 444436 | GTCGGAGGACGAGGTCAATA | 9.7 | 13748 | 13767 | 264 |
| 512634 | AGGGCCTCAGCCTGGCCGAA | 31.7 | 13452 | 13471 | 265 |
| 512635 | CAGGGCCTCAGCCTGGCCGA | 39.5 | 13453 | 13472 | 266 |
| 512636 | GTCAGGGCCTCAGCCTGGCC | 20.5 | 13455 | 13474 | 267 |
| 512637 | CGTCAGGGCCTCAGCCTGGC | 23.3 | 13456 | 13475 | 268 |
| 512638 | AGCAAATTTCCCGAGTAAGC | 14.7 | 13628 | 13647 | 269 |
| 512639 | AAGCAAATTTCCCGAGTAAG | 21.2 | 13629 | 13648 | 270 |
| 512640 | AAAAGCAAATTTCCCGAGTA | 23.0 | 13631 | 13650 | 271 |
| 512641 | CAAAAGCAAATTTCCCGAGT | 19.7 | 13632 | 13651 | 272 |
| 512642 | GCAAAAGCAAATTTCCCGAG | 26.6 | 13633 | 13652 | 273 |
| 512643 | GGCAAAAGCAAATTTCCCGA | 12.8 | 13634 | 13653 | 274 |
| 512644 | TGGCAAAAGCAAATTTCCCG | 12.2 | 13635 | 13654 | 275 |
| 512645 | TTTGGCAAAAGCAAATTTCC | 24.2 | 13637 | 13656 | 276 |
| 512646 | GTTTGGCAAAAGCAAATTTC | 25.5 | 13638 | 13657 | 277 |
| 512647 | GGGTTTGGCAAAAGCAAATT | 43.0 | 13640 | 13659 | 278 |
| 512648 | CGGGTTTGGCAAAAGCAAAT | 27.2 | 13641 | 13660 | 279 |
| 512649 | AAGCGGGTTTGGCAAAAGCA | 27.0 | 13644 | 13663 | 280 |
| 512650 | AATATCCAAACCGCCGAAGC | 45.7 | 13728 | 13747 | 281 |
| 512651 | AAATATCCAAACCGCCGAAG | 56.6 | 13729 | 13748 | 282 |
| 512652 | ATAAATATCCAAACCGCCGA | 39.0 | 13731 | 13750 | 283 |
| 512653 | AATAAATATCCAAACCGCCG | 34.7 | 13732 | 13751 | 284 |
| 512654 | TCAATAAATATCCAAACCGC | 34.7 | 13734 | 13753 | 285 |
| 512655 | GTCAATAAATATCCAAACCG | 19.1 | 13735 | 13754 | 286 |
| 512656 | GGTCAATAAATATCCAAACC | 24.3 | 13736 | 13755 | 287 |
| 512657 | AGGTCAATAAATATCCAAAC | 23.5 | 13737 | 13756 | 288 |
| 512658 | GAGGTCAATAAATATCCAAA | 24.2 | 13738 | 13757 | 289 |
| 512659 | ACGAGGTCAATAAATATCCA | 28.3 | 13740 | 13759 | 290 |
| 512660 | GACGAGGTCAATAAATATCC | 17.8 | 13741 | 13760 | 291 |
| 512661 | AGGACGAGGTCAATAAATAT | 45.7 | 13743 | 13762 | 292 |
| 512662 | GAGGACGAGGTCAATAAATA | 27.6 | 13744 | 13763 | 293 |
| 512663 | CGGAGGACGAGGTCAATAAA | 15.8 | 13746 | 13765 | 294 |
| 512664 | TCGGAGGACGAGGTCAATAA | 10.8 | 13747 | 13766 | 295 |
| 512665 | AGTCGGAGGACGAGGTCAAT | 15.4 | 13749 | 13768 | 296 |
| 512666 | GAGTCGGAGGACGAGGTCAA | 18.8 | 13750 | 13769 | 297 |
| 512667 | GCGAGTCGGAGGACGAGGTC | 26.0 | 13752 | 13771 | 298 |
| 512668 | AGCGAGTCGGAGGACGAGGT | 21.7 | 13753 | 13772 | 299 |
| 512669 | CAGCGAGTCGGAGGACGAGG | 13.7 | 13754 | 13773 | 300 |
| 512670 | TCAGCGAGTCGGAGGACGAG | 16.5 | 13755 | 13774 | 301 |
| 512671 | GTCAGCGAGTCGGAGGACGA | 17.4 | 13756 | 13775 | 302 |
| 512672 | CTGTCAGCGAGTCGGAGGAC | 25.2 | 13758 | 13777 | 303 |
| 512673 | CCTGTCAGCGAGTCGGAGGA | 18.4 | 13759 | 13778 | 304 |
| 512674 | AGCCTGTCAGCGAGTCGGAG | 16.8 | 13761 | 13780 | 305 |
| 512675 | GTCTCAGTGCATCCAAAACG | 11.8 | 13807 | 13826 | 306 |
| 512676 | GGTCTCAGTGCATCCAAAAC | 17.7 | 13808 | 13827 | 307 |
| 512677 | GGGTCTCAGTGCATCCAAAA | 11.2 | 13809 | 13828 | 308 |
| 512678 | GGAGGGCCTTTTATTCGCGA | 17.8 | 13884 | 13903 | 309 |
| 512679 | TGGAGGGCCTTTTATTCGCG | 13.2 | 13885 | 13904 | 310 |
| 512680 | ATGGAGGGCCTTTTATTCGC | 19.3 | 13886 | 13905 | 311 |
| 512681 | GATGGAGGGCCTTTTATTCG | 30.5 | 13887 | 13906 | 312 |
| 512682 | AGATGGAGGGCCTTTTATTC | 50.8 | 13888 | 13907 | 313 |
| 512683 | CAGATGGAGGGCCTTTTATT | 46.1 | 13889 | 13908 | 314 |
| 512684 | GCAGATGGAGGGCCTTTTAT | 50.4 | 13890 | 13909 | 315 |
| 512685 | CCCTCAGGCTCTCTGCTTTA | 34.7 | 655 | 674 | 316 |
| 512686 | GCCCTCAGGCTCTCTGCTTT | 47.9 | 656 | 675 | 317 |
| 512687 | AGCCCTCAGGCTCTCTGCTT | 47.4 | 657 | 676 | 318 |
| 512688 | TAGCCCTCAGGCTCTCTGCT | 54.1 | 658 | 677 | 319 |
| 512689 | TTAGCCCTCAGGCTCTCTGC | 48.0 | 659 | 678 | 320 |
| 512690 | TTTAGCCCTCAGGCTCTCTG | 50.7 | 660 | 679 | 321 |
| 512691 | ATTTAGCCCTCAGGCTCTCT | 47.3 | 661 | 680 | 322 |
| 512692 | AATTTAGCCCTCAGGCTCTC | 44.8 | 662 | 681 | 323 |
| 512693 | AAATTTAGCCCTCAGGCTCT | 39.2 | 663 | 682 | 324 |
| 512694 | TAAATTTAGCCCTCAGGCTC | 48.0 | 664 | 683 | 325 |
| 512695 | TTAAATTTAGCCCTCAGGCT | 54.9 | 665 | 684 | 326 |
| 512696 | GTTAAATTTAGCCCTCAGGC | 48.1 | 666 | 685 | 327 |
| 512697 | AGTTAAATTTAGCCCTCAGG | 39.3 | 667 | 686 | 328 |
| 512698 | CAGTTAAATTTAGCCCTCAG | 47.5 | 668 | 687 | 329 |
| 512699 | ACAGTTAAATTTAGCCCTCA | 68.2 | 669 | 688 | 330 |
| 512700 | GACAGTTAAATTTAGCCCTC | 59.2 | 670 | 689 | 331 |
| 512701 | GGACAGTTAAATTTAGCCCT | 63.7 | 671 | 690 | 332 |
| 512702 | CGGACAGTTAAATTTAGCCC | 50.7 | 672 | 691 | 333 |
| 512703 | TCGGACAGTTAAATTTAGCC | 39.6 | 673 | 692 | 334 |
| 512704 | CTCGGACAGTTAAATTTAGC | 36.5 | 674 | 693 | 335 |
| 512705 | ACTCGGACAGTTAAATTTAG | 59.1 | 675 | 694 | 336 |
| 512706 | GACTCGGACAGTTAAATTTA | 50.0 | 676 | 695 | 337 |
| 512707 | CGACTCGGACAGTTAAATTT | 63.0 | 677 | 696 | 338 |
| 512708 | CCGACTCGGACAGTTAAATT | 34.3 | 678 | 697 | 339 |
| 512709 | TCCGACTCGGACAGTTAAAT | 39.5 | 679 | 698 | 340 |

### Example 3: Design of Antisense Oligonucleotides Targeting Human Dystrophia Myotonica Protein Kinase (hDMPK)

[0662] A series of antisense oligonucleotides (ASOs) were designed to target hDMPK. The newly designed ASOs were prepared using standard oligonucleotide synthesis well known in the art and are described in Table 7, below. Subscripts “s” indicate phosphorothioate internucleoside linkages; subscripts “k” indicate 6′-(S)—CH₃ bicyclic nucleosides (cEt); subscripts “e” indicate 2′-O-methoxyethyl (MOE) modified nucleosides; and subscripts “d” indicate β-D-2′-deoxyribonucleosides. “^{m}C” indicates 5-methylcytosine nucleosides.

[0663] The antisense oligonucleotides targeted to a human DMPK nucleic acid were tested for their effect on DMPK RNA transcript in vitro. Cultured HepG2 cells at a density of 20,000 cells per well were transfected using electroporation with 4,500 nM antisense oligonucleotide. After approximately 24 hours, RNA was isolated from the cells and DMPK transcript levels were measured by quantitative real-time PCR. DMPK RNA transcript levels were adjusted according to total RNA content, as measured by RIBOGREEN®. Results are presented as percent expression of DMPK, relative to untreated control cells.

[0664] ‘Target start site’ indicates the 5′-most nucleoside to which the antisense oligonucleotide is targeted in the human genomic gene sequence. ‘Target stop site’ indicates the 3′-most nucleoside to which the antisense oligonucleotide is targeted in the human genomic sequence. All the antisense oligonucleotides listed in Table 7 target SEQ ID NO: 1 (GENBANK Accession No. NM_001081560.1).

[0665] Several of the antisense oligonucleotides demonstrated significant inhibition of DMPK mRNA levels under the conditions specified above.

TABLE 7
Inhibition of human DMPK RNA transcript in HepG2 cells targeting SEQ ID NO: 1

| | | | Start | Stop | | |
|---|---|---|---|---|---|---|
| | | | Site | Site | Un- | |
| | | | on | on | modified | Modified |
| ISIS | | % Target | Seq | Seq | Seq ID | Seq ID |
| No. | Sequence | Expression | ID: 1 | ID: 1 | No. | No. |
| UTC | N/A | 100 | N/A | N/A | | |
| 533424 | Tₑₛ^{m}CₑₛTₑₛ^{m}C_{ds}^{m}C_{ds}T_{ds}^{m}C_{ds}A_{ds}^{m}C_{ds}G_{ds} | 34.4 | 548 | 563 | 341 | 1345 |
| | G_{ds}A_{ds}A_{ds}Gₖₛ^{m}CₖₛAₖ | | | | | |
| 533425 | ^{m}CₑₛTₑₛ^{m}CₑₛT_{ds}^{m}C_{ds}^{m}C_{ds}T_{ds}^{m}C_{ds}A_{ds}^{m} | 32.1 | 549 | 564 | 342 | 1346 |
| | C_{ds}G_{ds}G_{ds}A_{ds}AₖₛGₖₛ^{m}Cₖ | | | | | |
| 533426 | ^{m}Cₑₛ^{m}CₑₛTₑₛ^{m}C_{ds}T_{ds}^{m}C_{ds}^{m}C_{ds}T_{ds}^{m}C_{ds} | 52.1 | 550 | 565 | 343 | 1347 |
| | A_{ds}^{m}C_{ds}G_{ds}G_{ds}AₖₛAₖₛGₖ | | | | | |
| 533427 | AₑₛAₑₛAₑₛ^{m}C_{ds}T_{ds}T_{ds}G_{ds}^{m}C_{ds}T_{ds}^{m}C_{ds} | 36.8 | 679 | 694 | 344 | 1348 |
| | A_{ds}G_{ds}^{m}C_{ds}AₖₛGₖₛTₖ | | | | | |
| 533428 | ^{m}CₑₛAₑₛAₑₛA_{ds}^{m}C_{ds}T_{ds}T_{ds}G_{ds}^{m}C_{ds}T_{ds} | 59.9 | 680 | 695 | 345 | 1349 |
| | ^{m}C_{ds}A_{ds}G_{ds}^{m}CₖₛAₖₛGₖ | | | | | |
| 533429 | ^{m}Cₑₛ^{m}CₑₛAₑₛA_{ds}A_{ds}^{m}C_{ds}T_{ds}T_{ds}G_{ds}^{m}C_{ds} | 39.3 | 681 | 696 | 346 | 1350 |
| | T_{ds}^{m}C_{ds}A_{ds}Gₖₛ^{m}CₖₛAₖ | | | | | |
| 533430 | ^{m}Cₑₛ^{m}Cₑₛ^{m}CₑₛA_{ds}A_{ds}A_{ds}^{m}C_{ds}T_{ds}T_{ds}G_{ds} | 37.6 | 682 | 697 | 347 | 1351 |
| | ^{m}C_{ds}T_{ds}^{m}C_{ds}AₖₛGₖₛ^{m}Cₖ | | | | | |
| 533431 | ^{m}Cₑₛ^{m}Cₑₛ^{m}Cₑₛ^{m}C_{ds}A_{ds}A_{ds}A_{ds}^{m}C_{ds}T_{ds}T_{ds} | 39.6 | 683 | 698 | 348 | 1352 |
| | G_{ds}^{m}C_{ds}T_{ds}^{m}CₖₛAₖₛGₖ | | | | | |
| 533432 | Tₑₛ^{m}Cₑₛ^{m}Cₑₛ^{m}C_{ds}^{m}C_{ds}A_{ds}A_{ds}A_{ds}^{m}C_{ds}T_{ds} | 52.1 | 684 | 699 | 349 | 1353 |
| | _{ds}T_{ds}G_{ds}^{m}C_{ds}Tₖₛ^{m}CₖₛAₖ | | | | | |
| 533433 | GₑₛTₑₛTₑₛT_{ds}G_{ds}A_{ds}T_{ds}G_{ds}T_{ds}^{m}C_{ds}^{m}C_{ds} | 53.9 | 782 | 797 | 350 | 1354 |
| | C_{ds}T_{ds}GₖₛTₖₛGₖ | | | | | |
| 533434 | GₑₛGₑₛTₑₛT_{ds}T_{ds}G_{ds}A_{ds}T_{ds}G_{ds}T_{ds}^{m}C_{ds} | 38.1 | 783 | 798 | 351 | 1355 |
| | ^{m}C_{ds}^{m}C_{ds}TₖₛGₖₛTₖ | | | | | |
| 533435 | GₑₛGₑₛGₑₛT_{ds}T_{ds}T_{ds}G_{ds}A_{ds}T_{ds}G_{ds}T_{ds}^{m} | 43.7 | 784 | 799 | 352 | 1356 |
| | C_{ds}^{m}C_{ds}^{m}CₖₛTₖₛGₖ | | | | | |
| 533436 | Aₑₛ^{m}CₑₛAₑₛG_{ds}^{m}C_{ds}^{m}C_{ds}T_{ds}G_{ds}^{m}C_{ds}A_{ds} | 29.5 | 927 | 942 | 353 | 1357 |
| | G_{ds}G_{ds}A_{ds}Tₖₛ^{m}CₖₛTₖ | | | | | |
| 533437 | ^{m}CₑₛAₑₛ^{m}CₑₛA_{ds}G_{ds}^{m}C_{ds}^{m}C_{ds}T_{ds}G_{ds}^{m} | 48.6 | 928 | 943 | 354 | 1358 |
| | C_{ds}A_{ds}G_{ds}G_{ds}AₖₛTₖₛ^{m}Cₖ | | | | | |
| 533438 | ^{m}Cₑₛ^{m}CₑₛAₑₛ^{m}C_{ds}A_{ds}G_{ds}^{m}C_{ds}^{m}C_{ds}T_{ds} | 46.9 | 929 | 944 | 355 | 1359 |
| | G_{ds}^{m}C_{ds}A_{ds}G_{ds}GₖₛAₖₛTₖ | | | | | |
| 533439 | ^{m}Cₑₛ^{m}Cₑₛ^{m}CₑₛA_{ds}^{m}C_{ds}A_{ds}G_{ds}^{m}C_{ds}^{m}C_{ds} | 43.6 | 930 | 945 | 356 | 1360 |
| | T_{ds}G_{ds}^{m}C_{ds}A_{ds}GₖₛGₖₛAₖ | | | | | |
| 533440 | Gₑₛ^{m}Cₑₛ^{m}Cₑₛ^{m}C_{ds}A_{ds}^{m}C_{ds}A_{ds}G_{ds}^{m}C_{ds}^{m} | 26.9 | 931 | 946 | 357 | 1361 |
| | C_{ds}T_{ds}G_{ds}^{m}C_{ds}AₖₛGₖₛGₖ | | | | | |
| 533441 | ^{m}CₑₛGₑₛ^{m}Cₑₛ^{m}C_{ds}^{m}C_{ds}A_{ds}^{m}C_{ds}A_{ds}G_{ds}^{m} | 31.3 | 932 | 947 | 358 | 1362 |
| | C_{ds}^{m}C_{ds}T_{ds}G_{ds}^{m}CₖₛAₖₛGₖ | | | | | |
| 533442 | ^{m}Cₑₛ^{m}CₑₛGₑₛ^{m}C_{ds}^{m}C_{ds}^{m}C_{ds}A_{ds}^{m}C_{ds}A_{ds} | 20.5 | 933 | 948 | 359 | 1363 |
| | G_{ds}^{m}C_{ds}^{m}C_{ds}T_{ds}Gₖₛ^{m}CₖₛAₖ | | | | | |
| 533443 | Aₑₛ^{m}Cₑₛ^{m}CₑₛG_{ds}^{m}C_{ds}^{m}C_{ds}^{m}C_{ds}A_{ds}^{m}C_{ds} | 13.7 | 934 | 949 | 360 | 1364 |
| | A_{ds}G_{ds}^{m}C_{ds}^{m}C_{ds}TₖₛGₖₛ^{m}Cₖ | | | | | |
| 533444 | ^{m}CₑₛAₑₛ^{m}CₑₛC_{ds}G_{ds}^{m}C_{ds}^{m}C_{ds}^{m}C_{ds}A_{ds} | 29.4 | 935 | 950 | 361 | 1365 |
| | ^{m}C_{ds}A_{ds}G_{ds}^{m}C_{ds}^{m}CₖₛTₖₛGₖ | | | | | |
| 533445 | ^{m}Cₑₛ^{m}CₑₛAₑₛ^{m}C_{ds}^{m}C_{ds}G_{ds}^{m}C_{ds}^{m}C_{ds}^{m}C_{ds} | 32 | 936 | 951 | 362 | 1366 |
| | A_{ds}^{m}C_{ds}A_{ds}G_{ds}^{m}Cₖₛ^{m}CₖₛTₖ | | | | | |
| 533446 | ^{m}Cₑₛ^{m}Cₑₛ^{m}CₑₛA_{ds}^{m}C_{ds}C_{ds}^{m}G_{ds}^{m}C_{ds}^{m}C_{ds} | 8.3 | 937 | 952 | 363 | 1367 |
| | ^{m}C_{ds}A_{ds}^{m}C_{ds}A_{ds}Gₖₛ^{m}Cₖₛ^{m}Cₖ | | | | | |
| 533447 | Gₑₛ^{m}Cₑₛ^{m}Cₑₛ^{m}C_{ds}A_{ds}^{m}C_{ds}^{m}C_{ds}G_{ds}^{m}C_{ds} | 18.3 | 938 | 953 | 364 | 1368 |
| | ^{m}C_{ds}^{m}C_{ds}A_{ds}^{m}C_{ds}AₖₛGₖₛ^{m}Cₖ | | | | | |
| 533448 | ^{m}Cₑₛ^{m}CₑₛAₑₛG_{ds}G_{ds}^{m}C_{ds}^{m}C_{ds}^{m}C_{ds}A_{ds}^{m} | 19.4 | 942 | 957 | 365 | 1369 |
| | C_{ds}^{m}C_{ds}G_{ds}^{m}C_{ds}^{m}Cₖₛ^{m}CₖₛAₖ | | | | | |
| 533449 | ^{m}Cₑₛ^{m}Cₑₛ^{m}CₑₛA_{ds}G_{ds}G_{ds}^{m}C_{ds}^{m}C_{ds}^{m}C_{ds} | 24.2 | 943 | 958 | 366 | 1370 |
| | A_{ds}^{m}C_{ds}^{m}C_{ds}G_{ds}^{m}Cₖₛ^{m}Cₖₛ^{m}Cₖ | | | | | |
| 533450 | Tₑₛ^{m}Cₑₛ^{m}Cₑₛ^{m}C_{ds}A_{ds}G_{ds}G_{ds}^{m}C_{ds}^{m}C_{ds}^{m} | 39.2 | 944 | 959 | 367 | 1371 |
| | C_{ds}A_{ds}^{m}C_{ds}^{m}C_{ds}Gₖₛ^{m}Cₖₛ^{m}Cₖ | | | | | |
| 533451 | TₑₛGₑₛ^{m}Cₑₛ^{m}C_{ds}T_{ds}G_{ds}T_{ds}^{m}C_{ds}^{m}C_{ds}^{m}C_{ds} | 44.2 | 950 | 965 | 368 | 1372 |
| | A_{ds}G_{ds}G_{ds}^{m}Cₖₛ^{m}Cₖₛ^{m}Cₖ | | | | | |
| 533452 | ^{m}CₑₛTₑₛGₑₛ^{m}C_{ds}^{m}C_{ds}T_{ds}G_{ds}T_{ds}^{m}C_{ds}^{m}C_{ds} | 55.6 | 951 | 966 | 369 | 1373 |
| | ^{m}C_{ds}A_{ds}G_{ds}Gₖₛ^{m}Cₖₛ^{m}Cₖ | | | | | |
| 533453 | Gₑₛ^{m}CₑₛTₑₛG_{ds}C_{ds}^{m}C_{ds}T_{ds}G_{ds}T_{ds}^{m}C_{ds} | 71.2 | 952 | 967 | 370 | 1374 |
| | ^{m}C_{ds}A_{ds}GₖₛGₖₛ^{m}Cₖ | | | | | |
| 533454 | GₑₛGₑₛTₑₛG_{ds}G_{ds}^{m}C_{ds}A_{ds}^{m}C_{ds}^{m}C_{ds}T_{ds} | 39.6 | 1276 | 1291 | 371 | 1375 |
| | T_{ds}^{m}C_{ds}G_{ds}AₖₛAₖₛAₖ | | | | | |
| 533455 | ^{m}CₑₛGₑₛGₑₛT_{ds}G_{ds}G_{ds}^{m}C_{ds}A_{ds}^{m}C_{ds}^{m}C_{ds} | 52.9 | 1277 | 1292 | 372 | 1376 |
| | T_{ds}T_{ds}^{m}C_{ds}GₖₛAₖₛAₖ | | | | | |
| 533456 | Tₑₛ^{m}CₑₛGₑₛG_{ds}T_{ds}G_{ds}G_{ds}^{m}C_{ds}A_{ds}^{m}C_{ds} | 27 | 1278 | 1293 | 373 | 1377 |
| | ^{m}C_{ds}T_{ds}T_{ds}^{m}CₖₛGₖₛAₖ | | | | | |
| 533457 | AₑₛGₑₛTₑₛG_{ds}A_{ds}G_{ds}^{m}C_{ds}^{m}C_{ds}^{m}C_{ds}G_{ds} | 51.5 | 1315 | 1330 | 374 | 1378 |
| | T_{ds}^{m}C_{ds}C_{ds}Tₖₛ^{m}Cₖₛ^{m}Cₖ | | | | | |
| 533458 | ^{m}CₑₛAₑₛGₑₛT_{ds}G_{ds}A_{ds}G_{ds}^{m}C_{ds}^{m}C_{ds}^{m}C_{ds} | 55.1 | 1316 | 1331 | 375 | 1379 |
| | G_{ds}T_{ds}^{m}C_{ds}^{m}CₖₛTₖₛ^{m}Cₖ | | | | | |
| 533459 | Gₑₛ^{m}CₑₛAₑₛG_{ds}T_{ds}G_{ds}A_{ds}G_{ds}C_{ds}^{m}C_{ds} | 33.7 | 1317 | 1332 | 376 | 1380 |
| | ^{m}C_{ds}G_{ds}T_{ds}^{m}Cₖₛ^{m}CₖₛTₖ | | | | | |
| 533460 | Tₑₛ^{m}Cₑₛ^{m}Cₑₛ^{m}C_{ds}G_{ds}A_{ds}A_{ds}T_{ds}G_{ds}T_{ds} | 28.7 | 1344 | 1359 | 377 | 1381 |
| | C_{ds}^{m}C_{ds}G_{ds}Aₖₛ^{m}CₖₛAₖ | | | | | |
| 533461 | TₑₛTₑₛ^{m}Cₑₛ^{m}C_{ds}^{m}C_{ds}G_{ds}A_{ds}A_{ds}T_{ds}G_{ds} | 36.2 | 1345 | 1360 | 378 | 1382 |
| | T_{ds}^{m}C_{ds}^{m}C_{ds}GₖₛAₖₛ^{m}Cₖ | | | | | |
| 533462 | ^{m}CₑₛTₑₛTₑₛC_{ds}^{m}C_{ds}^{m}C_{ds}G_{ds}A_{ds}A_{ds}T_{ds} | 23 | 1346 | 1361 | 379 | 1383 |
| | G_{ds}T_{ds}^{m}C_{ds}CₖₛGₖₛAₖ | | | | | |
| 533463 | ^{m}Cₑₛ^{m}CₑₛTₑₛT_{ds}C_{ds}^{m}C_{ds}^{m}C_{ds}G_{ds}A_{ds}A_{ds} | 11.5 | 1347 | 1362 | 380 | 1384 |
| | T_{ds}G_{ds}T_{ds}^{m}CₖₛCₖₛGₖ | | | | | |
| 533464 | Aₑₛ^{m}Cₑₛ^{m}CₑₛT_{ds}T_{ds}C_{ds}^{m}C_{ds}^{m}C_{ds}G_{ds}A_{ds} | 19.9 | 1348 | 1363 | 381 | 1385 |
| | A_{ds}T_{ds}G_{ds}Tₖₛ^{m}Cₖₛ^{m}Cₖ | | | | | |
| 533465 | ^{m}CₑₛAₑₛ^{m}Cₑₛ^{m}C_{ds}T_{ds}T_{ds}C_{ds}^{m}C_{ds}^{m}C_{ds} | 30.2 | 1349 | 1364 | 382 | 1386 |
| | G_{ds}A_{ds}A_{ds}T_{ds}GₖₛTₖₛCₖ | | | | | |
| 533466 | Gₑₛ^{m}CₑₛAₑₛC_{ds}^{m}C_{ds}T_{ds}T_{ds}C_{ds}^{m}C_{ds}^{m} | 30.2 | 1350 | 1365 | 383 | 1387 |
| | C_{ds}G_{ds}A_{ds}A_{ds}TₖₛGₖₛTₖ | | | | | |
| 533467 | ^{m}CₑₛGₑₛ^{m}CₑₛA_{ds}^{m}C_{ds}C_{ds}T_{ds}T_{ds}^{m}C_{ds} | 35.5 | 1351 | 1366 | 384 | 1388 |
| | C_{ds}^{m}C_{ds}G_{ds}A_{ds}AₖₛTₖₛGₖ | | | | | |
| 533468 | AₑₛTₑₛ^{m}Cₑₛ^{m}C_{ds}G_{ds}^{m}C_{ds}T_{ds}^{m}C_{ds}^{m}C_{ds}T_{ds} | 47.4 | 1746 | 1761 | 385 | 1389 |
| | G_{ds}^{m}C_{ds}A_{ds}Aₖₛ^{m}CₖₛTₖ | | | | | |
| 533469 | ^{m}CₑₛAₑₛTₑₛ^{m}C_{ds}^{m}C_{ds}G_{ds}^{m}C_{ds}T_{ds}C_{ds}^{m} | 51.2 | 1747 | 1762 | 386 | 1390 |
| | C_{ds}T_{ds}G_{ds}^{m}C_{ds}AₖₛAₖₛ^{m}Cₖ | | | | | |
| 533470 | ^{m}Cₑₛ^{m}CₑₛAₑₛT_{ds}C_{ds}^{m}C_{ds}G_{ds}^{m}C_{ds}T_{ds}^{m} | 35.5 | 1748 | 1763 | 387 | 1391 |
| | C_{ds}^{m}C_{ds}T_{ds}G_{ds}CₖₛAₖₛAₖ | | | | | |
| 533471 | Gₑₛ^{m}CₑₛTₑₛC_{ds}^{m}C_{ds}^{m}C_{ds}T_{ds}^{m}C_{ds}T_{ds}G_{ds} | 65.6 | 1770 | 1785 | 388 | 1392 |
| | ^{m}C_{ds}^{m}C_{ds}T_{ds}Gₖₛ^{m}CₖₛAₖ | | | | | |
| 533472 | AₑₛGₑₛGₑₛT_{ds}G_{ds}G_{ds}A_{ds}T_{ds}^{m}C_{ds}^{m}C_{ds}G_{ds} | 51.8 | 1816 | 1831 | 389 | 1393 |
| | T_{ds}G_{ds}Gₖₛ^{m}Cₖₛ^{m}Cₖ | | | | | |
| 533473 | GₑₛGₑₛGₑₛA_{ds}A_{ds}G_{ds}G_{ds}T_{ds}G_{ds}G_{ds}A_{ds} | 44.9 | 1820 | 1835 | 390 | 1394 |
| | T_{ds}^{m}C_{ds}^{m}CₖₛGₖₛTₖ | | | | | |
| 533474 | Aₑₛ^{m}CₑₛAₑₛG_{ds}G_{ds}A_{ds}G_{ds}^{m}C_{ds}A_{ds}G_{ds} | 80.8 | 1955 | 1970 | 391 | 1395 |
| | G_{ds}G_{ds}A_{ds}AₖₛAₖₛGₖ | | | | | |
| 533475 | ^{m}CₑₛAₑₛGₑₛA_{ds}C_{ds}T_{ds}G_{ds}^{m}C_{ds}G_{ds}G_{ds} | 95.5 | 2034 | 2049 | 392 | 1396 |
| | T_{ds}G_{ds}A_{ds}GₖₛTₖₛTₖ | | | | | |
| 533476 | GₑₛGₑₛ^{m}CₑₛT_{ds}C_{ds}^{m}C_{ds}T_{ds}G_{ds}G_{ds}G_{ds} | 55.7 | 2050 | 2065 | 393 | 1397 |
| | ^{m}C_{ds}G_{ds}G_{ds}^{m}CₖₛGₖₛCₖ | | | | | |
| 533477 | GₑₛGₑₛ^{m}CₑₛG_{ds}G_{ds}^{m}C_{ds}T_{ds}^{m}C_{ds}^{m}C_{ds}T_{ds} | 45.8 | 2053 | 2068 | 394 | 1398 |
| | G_{ds}G_{ds}G_{ds}^{m}CₖₛGₖₛGₖ | | | | | |
| 533478 | ^{m}CₑₛGₑₛ^{m}CₑₛG_{ds}G_{ds}G_{ds}^{m}C_{ds}G_{ds}G_{ds}^{m}C_{ds} | 83.7 | 2057 | 2072 | 395 | 1399 |
| | T_{ds}^{m}C_{ds}^{m}C_{ds}TₖₛGₖₛGₖ | | | | | |
| 533479 | GₑₛAₑₛGₑₛC_{ds}G_{ds}^{m}C_{ds}G_{ds}G_{ds}G_{ds}^{m}C_{ds} | 79.8 | 2060 | 2075 | 396 | 1400 |
| | G_{ds}G_{ds}^{m}C_{ds}TₖₛCₖₛ^{m}Cₖ | | | | | |
| 533480 | GₑₛGₑₛTₑₛT_{ds}^{m}C_{ds}A_{ds}G_{ds}G_{ds}G_{ds}A_{ds}G_{ds} | 49.4 | 2068 | 2083 | 397 | 1401 |
| | ^{m}C_{ds}G_{ds}^{m}CₖₛGₖₛGₖ | | | | | |
| 533481 | AₑₛGₑₛTₑₛTas^{m}C_{ds}T_{ds}A_{ds}G_{ds}G_{ds}G_{ds}T_{ds} | 37 | 2076 | 2091 | 398 | 1402 |
| | T_{ds}^{m}C_{ds}AₖₛGₖₛGₖ | | | | | |
| 533482 | ^{m}CₑₛAₑₛGₑₛT_{ds}T_{ds}C_{ds}T_{ds}A_{ds}G_{ds}G_{ds}G_{ds} | 28.5 | 2077 | 2092 | 399 | 1403 |
| | T_{ds}T_{ds}^{m}CₖₛAₖₛGₖ | | | | | |
| 533483 | AₑₛCₑₛAₑₛG_{ds}T_{ds}T_{ds}^{m}C_{ds}T_{ds}A_{ds}G_{ds}G_{ds} | 42 | 2078 | 2093 | 400 | 1404 |
| | G_{ds}T_{ds}Tₖₛ^{m}CₖₛAₖ | | | | | |
| 533484 | GₑₛAₑₛ^{m}CₑₛA_{ds}G_{ds}T_{ds}T_{ds}^{m}C_{ds}T_{ds}A_{ds}G_{ds} | 37.4 | 2079 | 2094 | 401 | 1405 |
| | G_{ds}G_{ds}TₖₛTₖₛ^{m}Cₖ | | | | | |
| 533485 | AₑₛGₑₛAₑₛ^{m}C_{ds}A_{ds}G_{ds}T_{ds}T_{ds}^{m}C_{ds}T_{ds}A_{ds} | 66.5 | 2080 | 2095 | 402 | 1406 |
| | G_{ds}G_{ds}GₖₛTₖₛTₖ | | | | | |
| 533486 | AₑₛAₑₛGₑₛA_{ds}^{m}C_{ds}A_{ds}G_{ds}T_{ds}T_{ds}C_{ds}T_{ds} | 62.4 | 2081 | 2096 | 403 | 1407 |
| | A_{ds}G_{ds}GₖₛGₖₛTₖ | | | | | |
| 533487 | GₑₛAₑₛAₑₛG_{ds}A_{ds}^{m}C_{ds}A_{ds}G_{ds}T_{ds}T_{ds}^{m}C_{ds} | 56.9 | 2082 | 2097 | 404 | 1408 |
| | T_{ds}A_{ds}GₖₛGₖₛGₖ | | | | | |
| 533488 | ^{m}CₑₛGₑₛAₑₛA_{ds}G_{ds}A_{ds}^{m}C_{ds}A_{ds}G_{ds}T_{ds}T_{ds} | 36.8 | 2083 | 2098 | 405 | 1409 |
| | ^{m}C_{ds}T_{ds}AₖₛGₖₛGₖ | | | | | |
| 533489 | Tₑₛ^{m}CₑₛGₑₛA_{ds}A_{ds}G_{ds}A_{ds}^{m}C_{ds}A_{ds}G_{ds}T_{ds} | 49.6 | 2084 | 2099 | 406 | 1410 |
| | T_{ds}^{m}C_{ds}TₖₛAₖₛGₖ | | | | | |
| 533490 | GₑₛTₑₛCₑₛG_{ds}A_{ds}A_{ds}G_{ds}A_{ds}^{m}C_{ds}A_{ds} | 40.4 | 2085 | 2100 | 407 | 1411 |
| | G_{ds}T_{ds}T_{ds}^{m}CₖₛTₖₛAₖ | | | | | |
| 533491 | AₑₛGₑₛTₑₛ^{m}C_{ds}G_{ds}A_{ds}A_{ds}G_{ds}A_{ds}^{m}C_{ds} | 37.4 | 2086 | 2101 | 408 | 1412 |
| | A_{ds}G_{ds}T_{ds}Tₖₛ^{m}CₖₛTₖ | | | | | |
| 533492 | GₑₛAₑₛGₑₛT_{ds}^{m}C_{ds}G_{ds}A_{ds}A_{ds}G_{ds}A_{ds}^{m} | 36.6 | 2087 | 2102 | 409 | 1413 |
| | C_{ds}A_{ds}G_{ds}TₖₛTₖₛ^{m}Cₖ | | | | | |
| 533493 | GₑₛGₑₛAₑₛG_{ds}T_{ds}C_{ds}G_{ds}A_{ds}A_{ds}G_{ds}A_{ds} | 33.2 | 2088 | 2103 | 410 | 1414 |
| | ^{m}C_{ds}A_{ds}GₖₛTₖₛTₖ | | | | | |
| 533494 | ^{m}CₑₛGₑₛGₑₛA_{ds}G_{ds}T_{ds}^{m}C_{ds}G_{ds}A_{ds}A_{ds} | 45.3 | 2089 | 2104 | 411 | 1415 |
| | G_{ds}A_{ds}^{m}C_{ds}AₖₛGₖₛTₖ | | | | | |
| 533495 | ^{m}Cₑₛ^{m}CₑₛGₑₛG_{ds}A_{ds}G_{ds}T_{ds}^{m}C_{ds}G_{ds}A_{ds} | 45.9 | 2090 | 2105 | 412 | 1416 |
| | A_{ds}G_{ds}A_{ds}^{m}CₖₛAₖₛGₖ | | | | | |
| 533496 | ^{m}Cₑₛ^{m}Cₑₛ^{m}CₑₛG_{ds}G_{ds}A_{ds}G_{ds}T_{ds}^{m}C_{ds}G_{ds} | 51.3 | 2091 | 2106 | 413 | 1417 |
| | A_{ds}A_{ds}G_{ds}Aₖₛ^{m}CₖₛAₖ | | | | | |
| 533497 | ^{m}Cₑₛ^{m}Cₑₛ^{m}Cₑₛ^{m}C_{ds}G_{ds}G_{ds}A_{ds}G_{ds}T_{ds}^{m} | 49.2 | 2092 | 2107 | 414 | 1418 |
| | C_{ds}G_{ds}A_{ds}A_{ds}GₖₛAₖₛ^{m}Cₖ | | | | | |
| 533498 | Gₑₛ^{m}Cₑₛ^{m}Cₑₛ^{m}C_{ds}^{m}C_{ds}G_{ds}G_{ds}A_{ds}G_{ds}T_{ds} | 52.3 | 2093 | 2108 | 415 | 1419 |
| | ^{m}C_{ds}G_{ds}A_{ds}AₖₛGₖₛAₖ | | | | | |
| 533499 | GₑₛGₑₛ^{m}Cₑₛ^{m}C_{ds}^{m}C_{ds}^{m}C_{ds}G_{ds}G_{ds}A_{ds}G_{ds} | 54.9 | 2094 | 2109 | 416 | 1420 |
| | T_{ds}^{m}C_{ds}G_{ds}AₖₛAₖₛGₖ | | | | | |
| 533500 | GₑₛGₑₛGₑₛ^{m}C_{ds}^{m}C_{ds}^{m}C_{ds}^{m}C_{ds}G_{ds}G_{ds}A_{ds} | 46.7 | 2095 | 2110 | 417 | 1421 |
| | G_{ds}T_{ds}^{m}C_{ds}GₖₛAₖₛAₖ | | | | | |
| 533809 | Aₑₛ^{m}CₑₛAₑₛA_{ds}T_{ds}A_{ds}A_{ds}A_{ds}T_{ds}A_{ds}^{m}C_{ds} | 51.4 | 2773 | 2788 | 418 | 1422 |
| | ^{m}C_{ds}G_{ds}AₖₛGₖₛGₖ | | | | | |

### Example 4: Design of Antisense Oligonucleotides Targeting Human Dystrophia Myotonica Protein Kinase (hDMPK)

### Dose Response HepG2

[0666] A series of antisense oligonucleotides (ASOs) were designed to target hDMPK The newly designed ASOs were prepared using standard oligonucleotide synthesis well known in the art and are described in Table 8, below. Subscripts “s” indicate phosphorothioate internucleoside linkages; subscripts “k” indicate 6′-(S)—CH₃ bicyclic nucleosides (cEt); subscripts “e” indicate 2′-O-methoxyethyl (MOE) modified nucleosides; and subscripts “d” indicate β-D-2′-deoxyribonucleosides. “c^{m}C” indicates 5-methylcytosine nucleosides.

[0667] The antisense oligonucleotides are targeted to SEQ ID NO: 1 (GENBANK Accession No. NM_001081560.1). “Start site” indicates the 5′-most nucleoside to which the gapmer is targeted in the human gene sequence. “Stop site” indicates the 3′-most nucleoside to which the gapmer is targeted human gene sequence.

TABLE 8
Design of antisense oligonucleotides targeting hDMPK

| | | | | Un- | |
|---|---|---|---|---|---|
| | | | | modified | Modified |
| ISIS | | Start | Stop | SEQ ID | SEQ ID |
| No. | Composition (5′ to 3′) | Site | Site | NO | NO |
| 533440 | Gₑₛ^{m}Cₑₛ^{m}Cₑₛ^{m}C_{ds}A_{ds}^{m}C_{ds}A_{ds}G_{ds}^{m}C_{ds}^{m}C_{ds}T_{ds}G_{ds}^{m}C_{ds} | 931 | 946 | 357 | 1361 |
| | AₖₛGₖₛGₖ | | | | |
| 533442 | ^{m}Cₑₛ^{m}CₑₛGₑₛ^{m}C_{ds}^{m}C_{ds}^{m}C_{ds}A_{ds}^{m}C_{ds}A_{ds}G_{ds}^{m}C_{ds}^{m}C_{ds}T_{ds} | 933 | 948 | 359 | 1363 |
| | Gₖₛ^{m}CₖₛAₖ | | | | |
| 533443 | Aₑₛ^{m}Cₑₛ^{m}CₑₛG_{ds}^{m}C_{ds}^{m}C_{ds}^{m}C_{ds}A_{ds}^{m}C_{ds}A_{ds}G_{ds}^{m}C_{ds}^{m} | 934 | 949 | 360 | 1364 |
| | C_{ds}TₖₛGₖₛ^{m}Cₖ | | | | |
| 533446 | ^{m}Cₑₛ^{m}Cₑₛ^{m}CₑₛA_{ds}^{m}C_{ds}^{m}C_{ds}G_{ds}^{m}C_{ds}^{m}C_{ds}^{m}C_{ds}A_{ds}^{m}C_{ds} | 937 | 952 | 363 | 1367 |
| | A_{ds}Gₖₛ^{m}Cₖₛ^{m}Cₖ | | | | |
| 533447 | Gₑₛ^{m}Cₑₛ^{m}Cₑₛ^{m}C_{ds}A_{ds}^{m}C_{ds}^{m}C_{ds}G_{ds}^{m}C_{ds}^{m}C_{ds}^{m}C_{ds}A_{ds}^{m} | 938 | 953 | 364 | 1368 |
| | C_{ds}AₖₛGₖₛ^{m}Cₖ | | | | |
| 533448 | ^{m}Cₑₛ^{m}CₑₛAₑₛG_{ds}G_{ds}^{m}C_{ds}^{m}C_{ds}^{m}C_{ds}A_{ds}^{m}C_{ds}^{m}C_{ds}G_{ds}^{m} | 942 | 957 | 365 | 1369 |
| | C_{ds}^{m}Cₖₛ^{m}CₖₛAₖ | | | | |
| 533449 | ^{m}Cₑₛ^{m}Cₑₛ^{m}CₑₛA_{ds}G_{ds}G_{ds}^{m}C_{ds}^{m}C_{ds}^{m}C_{ds}A_{ds}^{m}C_{ds}^{m}C_{ds} | 943 | 958 | 366 | 1370 |
| | G_{ds}^{m}Cₖₛ^{m}Cₖₛ^{m}Cₖ | | | | |
| 533462 | ^{m}CₑₛTₑₛTₑₛ^{m}C_{ds}^{m}C_{ds}^{m}C_{ds}G_{ds}A_{ds}A_{ds}T_{ds}G_{ds}T_{ds}^{m}C_{ds}^{m} | 1346 | 1361 | 379 | 1383 |
| | CₖₛGₖₛAₖ | | | | |
| 533463 | ^{m}Cₑₛ^{m}CₑₛTₑₛT_{ds}^{m}C_{ds}^{m}C_{ds}^{m}C_{ds}G_{ds}A_{ds}A_{ds}T_{ds}G_{ds}T_{ds}^{m} | 1347 | 1362 | 380 | 1384 |
| | Cₖₛ^{m}CₖₛGₖ | | | | |
| 533464 | Aₑₛ^{m}Cₑₛ^{m}CₑₛT_{ds}T_{ds}^{m}C_{ds}^{m}C_{ds}^{m}C_{ds}G_{ds}A_{ds}A_{ds}T_{ds}G_{ds}Tₖₛ | 1348 | 1363 | 381 | 1385 |
| | ^{m}Cₖₛ^{m}Cₖ | | | | |
| 533529 | ^{m}CₑₛGₑₛGₑₛT_{ds}T_{ds}G_{ds}T_{ds}G_{ds}A_{ds}A_{ds}^{m}C_{ds}T_{ds}G_{ds}Gₖₛ^{m} | 2162 | 2177 | 23 | 1423 |
| | CₖₛAₖ | | | | |
| 533530 | AₑₛGₑₛ^{m}CₑₛG_{ds}G_{ds}T_{ds}T_{ds}G_{ds}T_{ds}G_{ds}A_{ds}A_{ds}^{m}C_{ds}TₖₛGₖₛ | 2164 | 2179 | 419 | 1424 |
| | Gₖ | | | | |
| 533599 | Gₑₛ^{m}CₑₛAₑₛ^{m}C_{ds}T_{ds}T_{ds}T_{ds}G_{ds}^{m}C_{ds}G_{ds}A_{ds}A_{ds}^{m}C_{ds}^{m}Cₖₛ | 2492 | 2507 | 420 | 1425 |
| | AₖₛAₖ | | | | |
| 533600 | TₑₛGₑₛ^{m}CₑₛA_{ds}^{m}C_{ds}T_{ds}T_{ds}T_{ds}G_{ds}^{m}C_{ds}G_{ds}A_{ds}A_{ds}^{m}Cₖₛ | 2493 | 2508 | 421 | 1426 |
| | CₖₛAₖ | | | | |

### Example 5: Dose Response HepG2

[0668] Antisense oligonucleotides targeted to a human DMPK nucleic acid were tested for their effect on human DMPK RNA transcript in vitro. Cultured HepG2 cells at a density of 20,000 cells per well were transfected using electroporation with 625 nM, 1250 nM, 2500 nM, 5000 nM, and 10000.0 nM concentrations of each antisense oligonucleotide. After approximately 24 hours, RNA was isolated from the cells and DMPK RNA transcript levels were measured by quantitative real-time PCR using primer probe set RTS3164 (forward sequence AGCCTGAGCCGGGAGATG, designated herein as SEQ ID NO: 20; reverse sequence GCGTAGTTGACTGGCGAAGTT, designated herein as SEQ ID NO: 21; probe sequence AGGCCATCCGCACGGACAACCX, designated herein as SEQ ID NO: 22). Human DMPK RNA transcript levels were adjusted according to total RNA content, as measured by RIBOGREEN®. Results are presented in the table below as percent expression of human DMPK, relative to untreated control (UTC) cells. The tested antisense oligonucleotide sequences demonstrated dose-dependent inhibition of human DMPK mRNA levels under the conditions specified above.

TABLE 9
Inhibition of human DMPK RNA transcript
in HepG2 cells targeting SEQ ID NO: 1

| ISIS | Dose | % Target | Start Site | Stop Site |
|---|---|---|---|---|
| No. | (nM) | Expression | on Seq ID: 1 | on Seq ID: 1 |
| UTC | N/A | 100 | N/A | N/A |
| 486178 | 625.0 | 39.4 | 2773 | 2788 |
| 486178 | 1250.0 | 31.2 | 2773 | 2788 |
| 486178 | 2500.0 | 20.6 | 2773 | 2788 |
| 486178 | 5000.0 | 13 | 2773 | 2788 |
| 486178 | 10000.0 | 11.5 | 2773 | 2788 |
| 533440 | 625.0 | 55.4 | 931 | 946 |
| 533440 | 1250.0 | 40.4 | 931 | 946 |
| 533440 | 2500.0 | 25.4 | 931 | 946 |
| 533440 | 5000.0 | 22.6 | 931 | 946 |
| 533440 | 10000.0 | 10.3 | 931 | 946 |
| 533442 | 625.0 | 55.2 | 933 | 948 |
| 533442 | 1250.0 | 33.1 | 933 | 948 |
| 533442 | 2500.0 | 29 | 933 | 948 |
| 533442 | 5000.0 | 16.9 | 933 | 948 |
| 533442 | 10000.0 | 7.2 | 933 | 948 |
| 533443 | 625.0 | 44.8 | 934 | 949 |
| 533443 | 1250.0 | 29.4 | 934 | 949 |
| 533443 | 2500.0 | 19.9 | 934 | 949 |
| 533443 | 5000.0 | 10.8 | 934 | 949 |
| 533443 | 10000.0 | 7 | 934 | 949 |
| 533446 | 625.0 | 50.9 | 937 | 952 |
| 533446 | 1250.0 | 35.5 | 937 | 952 |
| 533446 | 2500.0 | 30.4 | 937 | 952 |
| 533446 | 5000.0 | 14.6 | 937 | 952 |
| 533446 | 10000.0 | 14 | 937 | 952 |
| 533447 | 625.0 | 53.3 | 938 | 953 |
| 533447 | 1250.0 | 31.7 | 938 | 953 |
| 533447 | 2500.0 | 16.8 | 938 | 953 |
| 533447 | 5000.0 | 11.7 | 938 | 953 |
| 533447 | 10000.0 | 4.4 | 938 | 953 |
| 533448 | 625.0 | 58.8 | 942 | 957 |
| 533448 | 1250.0 | 36.9 | 942 | 957 |
| 533448 | 2500.0 | 24.8 | 942 | 957 |
| 533448 | 5000.0 | 11.5 | 942 | 957 |
| 533448 | 10000.0 | 10.1 | 942 | 957 |
| 533449 | 625.0 | 61.1 | 943 | 958 |
| 533449 | 1250.0 | 42.8 | 943 | 958 |
| 533449 | 2500.0 | 30.4 | 943 | 958 |
| 533449 | 5000.0 | 20.2 | 943 | 958 |
| 533449 | 10000.0 | 10.1 | 943 | 958 |
| 533462 | 625.0 | 50.7 | 1346 | 1361 |
| 533462 | 1250.0 | 32.3 | 1346 | 1361 |
| 533462 | 2500.0 | 29.2 | 1346 | 1361 |
| 533462 | 5000.0 | 12.5 | 1346 | 1361 |
| 533462 | 10000.0 | 5.8 | 1346 | 1361 |
| 533463 | 625.0 | 39.1 | 1347 | 1362 |
| 533463 | 1250.0 | 23.7 | 1347 | 1362 |
| 533463 | 2500.0 | 12.6 | 1347 | 1362 |
| 533463 | 5000.0 | 9.3 | 1347 | 1362 |
| 533463 | 10000.0 | 3.2 | 1347 | 1362 |
| 533464 | 625.0 | 48.8 | 1348 | 1363 |
| 533464 | 1250.0 | 36.4 | 1348 | 1363 |
| 533464 | 2500.0 | 24.5 | 1348 | 1363 |
| 533464 | 5000.0 | 11.7 | 1348 | 1363 |
| 533464 | 10000.0 | 5 | 1348 | 1363 |
| 533529 | 625.0 | 35.8 | 2162 | 2177 |
| 533529 | 1250.0 | 26.4 | 2162 | 2177 |
| 533529 | 2500.0 | 18.3 | 2162 | 2177 |
| 533529 | 5000.0 | 14.8 | 2162 | 2177 |
| 533529 | 10000.0 | 14.7 | 2162 | 2177 |
| 533530 | 625.0 | 47.4 | 2164 | 2179 |
| 533530 | 1250.0 | 22.1 | 2164 | 2179 |
| 533530 | 2500.0 | 21.5 | 2164 | 2179 |
| 533530 | 5000.0 | 14.4 | 2164 | 2179 |
| 533530 | 10000.0 | 8 | 2164 | 2179 |
| 533599 | 625.0 | 31.3 | 2492 | 2507 |
| 533599 | 1250.0 | 21.9 | 2492 | 2507 |
| 533599 | 2500.0 | 13.1 | 2492 | 2507 |
| 533599 | 5000.0 | 8.8 | 2492 | 2507 |
| 533599 | 10000.0 | 7.3 | 2492 | 2507 |
| 533600 | 625.0 | 33.8 | 2493 | 2508 |
| 533600 | 1250.0 | 20.9 | 2493 | 2508 |
| 533600 | 2500.0 | 16.5 | 2493 | 2508 |
| 533600 | 5000.0 | 10.4 | 2493 | 2508 |
| 533600 | 10000.0 | 12.1 | 2493 | 2508 |

### Example 6: Design of Antisense Oligonucleotides Targeting Human Dystrophia Myotonica Protein Kinase (hDMPK)

[0669] A series of antisense oligonucleotides (ASOs) were designed to target hDMPK. The newly designed ASOs were prepared using standard oligonucleotide synthesis well known in the art and are described in Table 10, below. Subscripts “s” indicate phosphorothioate intemnucleoside linkages; subscripts “k” indicate 6′-(S)—CH₃ bicyclic nucleosides (cEt); subscripts “e” indicate 2′-O-methoxyethyl (MOE) modified nucleosides; and subscripts “d” indicate β-D-2′-deoxyribonucleosides. ^{m}C indicates 5-methylcytosine nucleosides.

[0670] The antisense oligonucleotides are targeted to SEQ ID NO: 2 (the complement of GENBANK Accession No. NT_011109.15 truncated from nucleotides 18540696 to 18555106). “Start site” indicates the 5′-most nucleoside to which the gapmer is targeted in the human gene sequence. “Stop site” indicates the 3′-most nucleoside to which the gapmer is targeted human gene sequence.

TABLE 10
Design of antisense oligonucleotides targeting hDMPK

| | | Start | Stop | Un- | |
|---|---|---|---|---|---|
| | | Site on | Site on | modified | Modified |
| ISIS | | Seq | Seq | Seq | Seq ID |
| No. | Sequence | ID: 2 | ID: 2 | ID No. | No. |
| UTC | N/A | N/A | N/A | | |
| 486178 | Aₖₛ^{m}CₖₛAₖₛA_{ds}T_{ds}A_{ds}A_{ds}A_{ds}T_{ds}A_{ds}^{m}C_{ds}^{m}C_{ds}G_{ds}AₖₛGₖₛ | 13836 | 13851 | 23 | 881 |
| | Gₖ | | | | |
| 533597 | Aₑₛ^{m}CₑₛTₑₛT_{ds}T_{ds}G_{ds}^{m}C_{ds}G_{ds}A_{ds}A_{ds}^{m}C_{ds}^{m}C_{ds}A_{ds}Aₖₛ^{m}Cₖₛ | 13553 | 13568 | 422 | 1427 |
| | Gₖ | | | | |
| 533603 | AₑₛAₑₛAₑₛG_{ds}^{m}C_{ds}T_{ds}T_{ds}T_{ds}G_{ds}^{m}C_{ds}A_{ds}^{m}C_{ds}T_{ds}TₖₛTₖₛ | 13563 | 13578 | 423 | 1428 |
| | Gₖ | | | | |
| 533617 | Tₑₛ^{m}Cₑₛ^{m}Cₑₛ^{m}C_{ds}G_{ds}A_{ds}G_{ds}T_{ds}A_{ds}A_{ds}G_{ds}^{m}C_{ds}A_{ds}GₖₛGₖₛ | 13624 | 13639 | 424 | 1429 |
| | ^{m}Cₖ | | | | |
| 533649 | Gₑₛ^{m}CₑₛAₑₛG_{ds}^{m}C_{ds}G_{ds}^{m}C_{ds}A_{ds}A_{ds}G_{ds}T_{ds}G_{ds}A_{ds}GₖₛGₖₛ | 13686 | 13701 | 425 | 1430 |
| | Aₖ | | | | |
| 533694 | GₑₛTₑₛ^{m}CₑₛA_{ds}G_{ds}^{m}C_{ds}G_{ds}A_{ds}G_{ds}T_{ds}^{m}C_{ds}G_{ds}G_{ds}AₖₛGₖₛ | 13760 | 13775 | 426 | 1431 |
| | Gₖ | | | | |
| 533697 | ^{m}CₑₛCₑₛTₑₛG_{ds}T_{ds}^{m}C_{ds}A_{ds}G_{ds}^{m}C_{ds}G_{ds}A_{ds}G_{ds}T_{ds}^{m}CₖₛGₖₛ | 13763 | 13778 | 427 | 1432 |
| | Gₖ | | | | |
| 533698 | Gₑₛ^{m}Cₑₛ^{m}CₑₛT_{ds}G_{ds}T_{ds}^{m}C_{ds}A_{ds}G_{ds}^{m}C_{ds}G_{ds}A_{ds}G_{ds}Tₖₛ^{m}Cₖₛ | 13764 | 13779 | 428 | 1433 |
| | Gₖ | | | | |
| 533699 | AₑₛGₑₛ^{m}Cₑₛ^{m}C_{ds}T_{ds}G_{ds}T_{ds}^{m}C_{ds}A_{ds}G_{ds}^{m}C_{ds}G_{ds}A_{ds}GₖₛTₖₛ | 13765 | 13780 | 429 | 1434 |
| | ^{m}Cₖ | | | | |
| 533711 | GₑₛGₑₛGₑₛT_{ds}^{m}C_{ds}T_{ds}^{m}C_{ds}A_{ds}G_{ds}T_{ds}G_{ds}^{m}C_{ds}A_{ds}Tₖₛ^{m}Cₖₛ | 13813 | 13828 | 430 | 1435 |
| | ^{m}Cₖ | | | | |
| 533721 | AₑₛGₑₛGₑₛT_{ds}T_{ds}T_{ds}T_{ds}T_{ds}^{m}C_{ds}^{m}C_{ds}A_{ds}G_{ds}A_{ds}GₖₛGₖₛ^{m} | 2580 | 2595 | 431 | 1436 |
| | Cₖ | | | | |
| 533722 | AₑₛAₑₛGₑₛG_{ds}T_{ds}T_{ds}T_{ds}T_{ds}T_{ds}^{m}C_{ds}^{m}C_{ds}A_{ds}G_{ds}AₖₛGₖₛGₖ | 2581 | 2596 | 432 | 1437 |
| 533751 | GₑₛGₑₛTₑₛ^{m}C_{ds}A_{ds}^{m}C_{ds}T_{ds}G_{ds}^{m}C_{ds}T_{ds}G_{ds}G_{ds}G_{ds}Tₖₛ^{m}Cₖₛ | 6446 | 6461 | 433 | 1438 |
| | ^{m}Cₖ | | | | |
| 533786 | GₑₛTₑₛGₑₛG_{ds}T_{ds}T_{ds}T_{ds}^{m}C_{ds}T_{ds}G_{ds}T_{ds}C_{ds}T_{ds}Gₖₛ^{m}CₖₛTₖ | 11099 | 11114 | 434 | 1439 |
| 533787 | ^{m}CₑₛGₑₛTₑₛG_{ds}G_{ds}T_{ds}T_{ds}T_{ds}^{m}C_{ds}T_{ds}G_{ds}T_{ds}^{m}C_{ds}TₖₛGₖₛ^{m} | 11100 | 11115 | 435 | 1440 |
| | Cₖ | | | | |

### Example 7: Dose Response for ASOs Targeted to a Human DMPK RNA Transcript in HepG2 Cells

[0671] Antisense oligonucleotides targeted to a human DMPK nucleic acid were tested for their effect on human DMPK RNA transcript in vitro. Cultured HepG2 cells at a density of 20,000 cells per well were transfected using electroporation with 625 nM, 1250 nM, 2500 nM, 5000 nM, and 10000.0 nM concentrations of each antisense oligonucleotide. After approximately 24 hours, RNA was isolated from the cells and DMPK RNA transcript levels were measured by quantitative real-time PCR using primer probe set RTS3164 (forward sequence AGCCTGAGCCGGGAGATG, designated herein as SEQ ID NO: 20; reverse sequence GCGTAGTTGACTGGCGAAGTT, designated herein as SEQ ID NO: 21; probe sequence AGGCCATCCGCACGGACAACCX, designated herein as SEQ ID NO: 22). Human DMPK RNA transcript levels were adjusted according to total RNA content, as measured by RIBOGREEN®. Results are presented as percent expression of human DMPK, relative to untreated control (UTC) cells and are shown in the table below. The tested antisense oligonucleotide sequences demonstrated dose-dependent inhibition of human DMPK mRNA levels under the conditions specified above.

TABLE 11
Inhibition of human DMPK RNA transcript
in HepG2 cells targeting SEQ ID NO: 1

| ISIS | Dose | % Target | Start Site | Stop Site |
|---|---|---|---|---|
| No. | (nM) | Expression | on Seq ID: 2 | on Seq ID: 2 |
| UTC | NA | 100 | N/A | N/A |
| 486178 | 625.000 | 39.4 | 13836 | 13851 |
| 486178 | 1250.000 | 27.3 | 13836 | 13851 |
| 486178 | 2500.000 | 14 | 13836 | 13851 |
| 486178 | 5000.000 | 16.3 | 13836 | 13851 |
| 486178 | 10000.000 | 8.3 | 13836 | 13851 |
| 533597 | 625.000 | 42.4 | 13553 | 13568 |
| 533597 | 1250.000 | 30.3 | 13553 | 13568 |
| 533597 | 2500.000 | 15.3 | 13553 | 13568 |
| 533597 | 5000.000 | 10 | 13553 | 13568 |
| 533597 | 10000.000 | 10.6 | 13553 | 13568 |
| 533603 | 625.000 | 48.2 | 13563 | 13578 |
| 533603 | 1250.000 | 31.1 | 13563 | 13578 |
| 533603 | 2500.000 | 22.4 | 13563 | 13578 |
| 533603 | 5000.000 | 15.6 | 13563 | 13578 |
| 533603 | 10000.000 | 9.9 | 13563 | 13578 |
| 533617 | 625.000 | 38.4 | 13624 | 13639 |
| 533617 | 1250.000 | 26.3 | 13624 | 13639 |
| 533617 | 2500.000 | 21.6 | 13624 | 13639 |
| 533617 | 5000.000 | 15.8 | 13624 | 13639 |
| 533617 | 10000.000 | 14.6 | 13624 | 13639 |
| 533649 | 625.000 | 52.2 | 13686 | 13701 |
| 533649 | 1250.000 | 27.8 | 13686 | 13701 |
| 533649 | 2500.000 | 24.6 | 13686 | 13701 |
| 533649 | 5000.000 | 20.5 | 13686 | 13701 |
| 533649 | 10000.000 | 14.5 | 13686 | 13701 |
| 533694 | 625.000 | 53.3 | 13760 | 13775 |
| 533694 | 1250.000 | 29.4 | 13760 | 13775 |
| 533694 | 2500.000 | 23.6 | 13760 | 13775 |
| 533694 | 5000.000 | 18.7 | 13760 | 13775 |
| 533694 | 10000.000 | 13.5 | 13760 | 13775 |
| 533697 | 625.000 | 30.6 | 13763 | 13778 |
| 533697 | 1250.000 | 14.9 | 13763 | 13778 |
| 533697 | 2500.000 | 13.8 | 13763 | 13778 |
| 533697 | 5000.000 | 9.7 | 13763 | 13778 |
| 533697 | 10000.000 | 7.1 | 13763 | 13778 |
| 533698 | 625.000 | 23.4 | 13764 | 13779 |
| 533698 | 1250.000 | 15.5 | 13764 | 13779 |
| 533698 | 2500.000 | 13.8 | 13764 | 13779 |
| 533698 | 5000.000 | 12.4 | 13764 | 13779 |
| 533698 | 10000.000 | 10.2 | 13764 | 13779 |
| 533699 | 625.000 | 38.2 | 13765 | 13780 |
| 533699 | 1250.000 | 26.9 | 13765 | 13780 |
| 533699 | 2500.000 | 17.6 | 13765 | 13780 |
| 533699 | 5000.000 | 12.9 | 13765 | 13780 |
| 533699 | 10000.000 | 9.3 | 13765 | 13780 |
| 533711 | 625.000 | 35.1 | 13813 | 13828 |
| 533711 | 1250.000 | 34.6 | 13813 | 13828 |
| 533711 | 2500.000 | 22.4 | 13813 | 13828 |
| 533711 | 5000.000 | 22 | 13813 | 13828 |
| 533711 | 10000.000 | 13 | 13813 | 13828 |
| 533721 | 625.000 | 36.3 | 2580 | 2595 |
| 533721 | 1250.000 | 29.8 | 2580 | 2595 |
| 533721 | 2500.000 | 23.2 | 2580 | 2595 |
| 533721 | 5000.000 | 17.8 | 2580 | 2595 |
| 533721 | 10000.000 | 17.2 | 2580 | 2595 |
| 533722 | 625.000 | 48.5 | 2581 | 2596 |
| 533722 | 1250.000 | 28.6 | 2581 | 2596 |
| 533722 | 2500.000 | 21.9 | 2581 | 2596 |
| 533722 | 5000.000 | 28.1 | 2581 | 2596 |
| 533722 | 10000.000 | 13.8 | 2581 | 2596 |
| 533751 | 625.000 | 37.7 | 6446 | 6461 |
| 533751 | 1250.000 | 21.6 | 6446 | 6461 |
| 533751 | 2500.000 | 12.6 | 6446 | 6461 |
| 533751 | 5000.000 | 9.7 | 6446 | 6461 |
| 533751 | 10000.000 | 8.5 | 6446 | 6461 |
| 533786 | 625.000 | 53.6 | 11099 | 11114 |
| 533786 | 1250.000 | 26.6 | 11099 | 11114 |
| 533786 | 2500.000 | 14.7 | 11099 | 11114 |
| 533786 | 5000.000 | 9.6 | 11099 | 11114 |
| 533786 | 10000.000 | 5.5 | 11099 | 11114 |
| 533787 | 625.000 | 43.8 | 11100 | 11115 |
| 533787 | 1250.000 | 27.7 | 11100 | 11115 |
| 533787 | 2500.000 | 16.3 | 11100 | 11115 |
| 533787 | 5000.000 | 7 | 11100 | 11115 |
| 533787 | 10000.000 | 4.5 | 11100 | 11115 |

### Example 8: ASOs Designed to Target a Human DMPK RNA Transcript

[0672] A series of antisense oligonucleotides (ASOs) were designed to target hDMPK. The newly designed ASOs were prepared using standard oligonucleotide synthesis well known in the art and are described in Table 12, below. Subscripts “s” indicate phosphorothioate internucleoside linkages; subscripts “k” indicate 6′-(S)—CH₃ bicyclic nucleosides (cEt); subscripts “e” indicate 2′-methoxyethyl (MOE) modified nucleosides; and subscripts “d” indicate β-D-2′-deoxyribonucleosides. “^{m}C” indicates 5-methylcytosine nucleosides.

[0673] The antisense oligonucleotides targeted to a human DMPK nucleic acid were tested for their effect on DMPK RNA transcript in vitro. Cultured hSKMC cells at a density of 20,000 cells per well were transfected using electroporation with 800 nM antisense oligonucleotide. After approximately 24 hours, RNA was isolated from the cells and DMPK transcript levels were measured by quantitative real-time PCR. DMPK RNA transcript levels were adjusted according to total RNA content, as measured by RIBOGREEN®. Results are presented as percent expression of DMPK, relative to untreated control cells.

[0674] ‘Target start site’ indicates the 5′-most nucleoside to which the antisense oligonucleotide is targeted in the human genomic gene sequence. ‘Target stop site’ indicates the 3′-most nucleoside to which the antisense oligonucleotide is targeted in the human genomic sequence. All the antisense oligonucleotides listed in Table 12 target SEQ ID NO: 1 (GENBANK Accession No. NM_001081560.1).

[0675] Several of the antisense oligonucleotides demonstrated significant inhibition of DMPK mRNA levels under the conditions specified above.

TABLE 12
Inhibition of human DMPK RNA transcript in HepG2 cells using ASOs targeting SEQ ID NO: 1

| | | | Start | Stop | | |
|---|---|---|---|---|---|---|
| | | | Site | Site | | |
| | | | on | on | Unmodified | Modified |
| | | % Target | Seq | Seq | Seq ID | Seq ID |
| ISIS No. | Sequence | Expression | ID: 1 | ID: 1 | No. | No. |
| UTC | N/A | 100 | N/A | N/A | | |
| 444401 | TₑₛTₑₛGₑₛ^{m}CₑₛAₑₛ^{m}C_{ds}T_{ds}T_{ds}T_{ds}G_{ds}^{m}C_{ds}G_{ds}A_{ds}A_{ds} | 25.2 | 2490 | 2509 | 33 | 1445 |
| | ^{m}C_{ds}^{m}CₑₛAₑₛAₑₛ^{m}CₑₛGₑ | | | | | |
| 444436 | GₑₛTₑₛ^{m}CₑₛGₑₛGₑₛA_{ds}G_{ds}G_{ds}A_{ds}^{m}C_{ds}G_{ds}A_{ds}G_{ds}G_{ds} | 30.8 | 2685 | 2704 | 264 | 1446 |
| | T_{ds}^{m}CₑₛAₑₛAₑₛTₑₛAₑ | | | | | |
| 486072 | AₖₛAₖₛGₖₛA_{ds}^{m}C_{ds}A_{ds}G_{ds}T_{ds}T_{ds}^{m}C_{ds}T_{ds}A_{ds}G_{ds}Gₖₛ | 36.8 | 2081 | 2096 | 403 | 884 |
| | GₖₛTₖ | | | | | |
| 486073 | ^{m}CₖₛGₖₛAₖₛA_{ds}G_{ds}A_{ds}^{m}C_{ds}A_{ds}G_{ds}T_{ds}T_{ds}^{m}C_{ds}T_{ds}Aₖₛ | 22.4 | 2083 | 2098 | 405 | 885 |
| | GₖₛGₖ | | | | | |
| 486075 | GₖₛTₖₛ^{m}CₖₛG_{ds}A_{ds}A_{ds}G_{ds}A_{ds}^{m}C_{ds}A_{ds}G_{ds}T_{ds}T_{ds}^{m}Cₖₛ | 41.3 | 2085 | 2100 | 407 | 886 |
| | TₖₛAₖ | | | | | |
| 486076 | AₖₛGₖₛTₖₛ^{m}C_{ds}G_{ds}A_{ds}A_{ds}G_{ds}A_{ds}^{m}C_{ds}A_{ds}G_{ds}T_{ds}Tₖₛ | 22.4 | 2086 | 2101 | 408 | 887 |
| | ^{m}CₖₛTₖ | | | | | |
| 486077 | GₖₛAₖₛGₖₛT_{ds}^{m}C_{ds}G_{ds}A_{ds}A_{ds}G_{ds}A_{ds}^{m}C_{ds}A_{ds}G_{ds}Tₖₛ | 35.2 | 2087 | 2102 | 409 | 888 |
| | Tₖₛ^{m}Cₖ | | | | | |
| 486078 | ^{m}CₖₛGₖₛGₖₛA_{ds}G_{ds}T_{ds}^{m}C_{ds}G_{ds}A_{ds}A_{ds}G_{ds}A_{ds}^{m}C_{ds}Aₖₛ | 12.4 | 2089 | 2104 | 411 | 889 |
| | GₖₛTₖ | | | | | |
| 486079 | ^{m}Cₖₛ^{m}Cₖₛ^{m}CₖₛG_{ds}G_{ds}A_{ds}G_{ds}T_{ds}^{m}C_{ds}G_{ds}A_{ds}A_{ds}G_{ds} | 36.5 | 2091 | 2106 | 413 | 890 |
| | Aₖₛ^{m}CₖₛAₖ | | | | | |
| 486080 | ^{m}Cₖₛ^{m}Cₖₛ^{m}Cₖₛ^{m}C_{ds}G_{ds}G_{ds}A_{ds}G_{ds}T_{ds}^{m}C_{ds}G_{ds}A_{ds}A_{ds} | 19.9 | 2092 | 2107 | 414 | 891 |
| | GₖₛAₖₛ^{m}Cₖ | | | | | |
| 486085 | GₖₛAₖₛAₖₛ^{m}C_{ds}T_{ds}G_{ds}G_{ds}^{m}C_{ds}A_{ds}G_{ds}G_{ds}^{m}C_{ds}G_{ds}Gₖₛ | 30.1 | 2155 | 2170 | 436 | 892 |
| | TₖₛGₖ | | | | | |
| 486086 | TₖₛGₖₛTₖₛG_{ds}A_{ds}A_{ds}^{m}C_{ds}T_{ds}G_{ds}G_{ds}^{m}C_{ds}A_{ds}G_{ds}Gₖₛ | 17.2 | 2158 | 2173 | 437 | 893 |
| | ^{m}CₖₛGₖ | | | | | |
| 486087 | GₖₛGₖₛTₖₛT_{ds}G_{ds}T_{ds}G_{ds}A_{ds}A_{ds}^{m}C_{ds}T_{ds}G_{ds}G_{ds}^{m}Cₖₛ | 11.5 | 2161 | 2176 | 438 | 894 |
| | AₖₛGₖ | | | | | |
| 486088 | GₖₛAₖₛGₖₛ^{m}C_{ds}G_{ds}G_{ds}T_{ds}T_{ds}G_{ds}T_{ds}G_{ds}A_{ds}A_{ds}^{m}Cₖₛ | 21.7 | 2165 | 2180 | 439 | 895 |
| | TₖₛGₖ | | | | | |
| 486094 | Aₖₛ^{m}CₖₛTₖₛG_{ds}G_{ds}A_{ds}G_{ds}^{m}C_{ds}T_{ds}G_{ds}G_{ds}G_{ds}^{m}C_{ds}Gₖₛ | 30.2 | 2193 | 2208 | 440 | 896 |
| | GₖₛAₖ | | | | | |
| 486096 | AₖₛGₖₛGₖₛA_{ds}^{m}C_{ds}T_{ds}G_{ds}G_{ds}A_{ds}G_{ds}^{m}C_{ds}T_{ds}G_{ds}Gₖₛ | 43.5 | 2196 | 2211 | 441 | 897 |
| | Gₖₛ^{m}Cₖ | | | | | |
| 486097 | Tₖₛ^{m}CₖₛAₖₛ^{m}C_{ds}A_{ds}G_{ds}G_{ds}A_{ds}^{m}C_{ds}T_{ds}G_{ds}G_{ds}A_{ds}Gₖₛ | 54.5 | 2200 | 2215 | 442 | 898 |
| | ^{m}CₖₛTₖ | | | | | |
| 486098 | AₖₛTₖₛ^{m}CₖₛA_{ds}^{m}C_{ds}A_{ds}G_{ds}G_{ds}A_{ds}^{m}C_{ds}T_{ds}G_{ds}G_{ds}Aₖₛ | 77.3 | 2201 | 2216 | 443 | 899 |
| | Gₖₛ^{m}Cₖ | | | | | |
| 486099 | GₖₛGₖₛAₖₛT_{ds}^{m}C_{ds}A_{ds}^{m}C_{ds}A_{ds}G_{ds}G_{ds}A_{ds}^{m}C_{ds}T_{ds}Gₖₛ | 24.8 | 2203 | 2218 | 444 | 900 |
| | GₖₛAₖ | | | | | |
| 486101 | ^{m}CₖₛAₖₛGₖₛ^{m}C_{ds}^{m}C_{ds}T_{ds}G_{ds}G_{ds}^{m}C_{ds}^{m}C_{ds}G_{ds}A_{ds}A_{ds} | 31.6 | 2386 | 2401 | 445 | 901 |
| | AₖₛGₖₛAₖ | | | | | |
| 486102 | ^{m}CₖₛTₖₛ^{m}CₖₛA_{ds}G_{ds}^{m}C_{ds}^{m}C_{ds}T_{ds}G_{ds}G_{ds}^{m}C_{ds}^{m}C_{ds}G_{ds} | 35.1 | 2388 | 2403 | 446 | 902 |
| | AₖₛAₖₛAₖ | | | | | |
| 486104 | GₖₛTₖₛ^{m}CₖₛA_{ds}G_{ds}G_{ds}G_{ds}^{m}C_{ds}^{m}C_{ds}T_{ds}^{m}C_{ds}A_{ds}G_{ds}^{m} | 26.9 | 2396 | 2411 | 447 | 903 |
| | Cₖₛ^{m}CₖₛTₖ | | | | | |
| 486105 | ^{m}CₖₛGₖₛTₖₛ^{m}C_{ds}A_{ds}G_{ds}G_{ds}G_{ds}^{m}C_{ds}^{m}C_{ds}T_{ds}^{m}C_{ds}A_{ds} | 48.4 | 2397 | 2412 | 448 | 904 |
| | Gₖₛ^{m}Cₖₛ^{m}Cₖ | | | | | |
| 486110 | TₖₛTₖₛTₖₛG_{ds}^{m}C_{ds}A_{ds}^{m}C_{ds}T_{ds}T_{ds}T_{ds}G_{ds}^{m}C_{ds}G_{ds}Aₖₛ | 31.6 | 2495 | 2510 | 449 | 905 |
| | Aₖₛ^{m}Cₖ | | | | | |
| 486111 | GₖₛAₖₛAₖₛA_{ds}G_{ds}^{m}C_{ds}T_{ds}T_{ds}T_{ds}G_{ds}^{m}C_{ds}A_{ds}^{m}C_{ds}Tₖₛ | 31.9 | 2501 | 2516 | 450 | 906 |
| | TₖₛTₖ | | | | | |
| 486112 | AₖₛAₖₛTₖₛT_{ds}T_{ds}^{m}C_{ds}^{m}C_{ds}^{m}C_{ds}G_{ds}A_{ds}G_{ds}T_{ds}A_{ds}Aₖₛ | 47.4 | 2565 | 2580 | 451 | 907 |
| | Gₖₛ^{m}Cₖ | | | | | |
| 486115 | Gₖₛ^{m}CₖₛAₖₛA_{ds}A_{ds}T_{ds}T_{ds}T_{ds}^{m}C_{ds}^{m}C_{ds}^{m}C_{ds}G_{ds}A_{ds} | 20.8 | 2568 | 2583 | 452 | 90 |
| | GₖₛTₖₛAₖ | | | | | |
| 486116 | AₖₛGₖₛ^{m}CₖₛA_{ds}A_{ds}A_{ds}T_{ds}T_{ds}T_{ds}^{m}C_{ds}^{m}C_{ds}^{m}C_{ds}G_{ds} | 23.9 | 2569 | 2584 | 453 | 909 |
| | AₖₛGₖₛTₖ | | | | | |
| 486117 | AₖₛAₖₛGₖₛ^{m}C_{ds}A_{ds}A_{ds}A_{ds}T_{ds}T_{ds}T_{ds}^{m}C_{ds}^{m}C_{ds}^{m}C_{ds} | 22 | 2570 | 2585 | 454 | 910 |
| | GₖₛAₖₛGₖ | | | | | |
| 486118 | AₖₛAₖₛAₖₛG_{ds}^{m}C_{ds}A_{ds}A_{ds}A_{ds}T_{ds}T_{ds}T_{ds}^{m}C_{ds}^{m}C_{ds}^{m} | 26.7 | 2571 | 2586 | 455 | 911 |
| | CₖₛGₖₛAₖ | | | | | |
| 486119 | AₖₛAₖₛAₖₛA_{ds}G_{ds}^{m}C_{ds}A_{ds}A_{ds}A_{ds}T_{ds}T_{ds}T_{ds}^{m}C_{ds}^{m}Cₖₛ | 33.5 | 2572 | 2587 | 456 | 912 |
| | ^{m}CₖₛGₖ | | | | | |
| 486120 | Gₖₛ^{m}CₖₛAₖₛA_{ds}A_{ds}A_{ds}G_{ds}^{m}C_{ds}A_{ds}A_{ds}A_{ds}T_{ds}T_{ds}Tₖₛ | 51.4 | 2574 | 2589 | 457 | 913 |
| | ^{m}Cₖₛ^{m}Cₖ | | | | | |
| 486121 | GₖₛGₖₛ^{m}CₖₛA_{ds}A_{ds}A_{ds}A_{ds}G_{ds}^{m}C_{ds}A_{ds}A_{ds}A_{ds}T_{ds}Tₖₛ | 60.8 | 2575 | 2590 | 458 | 914 |
| | Tₖₛ^{m}Cₖ | | | | | |
| 486123 | TₖₛTₖₛGₖₛG_{ds}^{m}C_{ds}A_{ds}A_{ds}A_{ds}A_{ds}G_{ds}^{m}C_{ds}A_{ds}A_{ds}Aₖₛ | 39.8 | 2577 | 2592 | 459 | 915 |
| | TₖₛTₖ | | | | | |
| 486125 | GₖₛTₖₛTₖₛT_{ds}G_{ds}G_{ds}^{m}C_{ds}A_{ds}A_{ds}A_{ds}A_{ds}G_{ds}^{m}C_{ds}Aₖₛ | 32.7 | 2579 | 2594 | 460 | 916 |
| | AₖₛAₖ | | | | | |
| 486126 | GₖₛGₖₛTₖₛT_{ds}T_{ds}G_{ds}G_{ds}^{m}C_{ds}A_{ds}A_{ds}A_{ds}A_{ds}G_{ds}^{m}Cₖₛ | 19.2 | 2580 | 2595 | 461 | 917 |
| | AₖₛAₖ | | | | | |
| 486127 | GₖₛGₖₛGₖₛT_{ds}T_{ds}T_{ds}G_{ds}G_{ds}^{m}C_{ds}A_{ds}A_{ds}A_{ds}A_{ds}Gₖₛ^{m} | 36.1 | 2581 | 2596 | 462 | 918 |
| | CₖₛAₖ | | | | | |
| 486128 | Gₖₛ^{m}CₖₛGₖₛG_{ds}G_{ds}T_{ds}T_{ds}T_{ds}G_{ds}G_{ds}^{m}C_{ds}A_{ds}A_{ds}Aₖₛ | 39.1 | 2583 | 2598 | 463 | 919 |
| | AₖₛGₖ | | | | | |
| 486129 | AₖₛGₖₛ^{m}CₖₛG_{ds}G_{ds}G_{ds}T_{ds}T_{ds}T_{ds}G_{ds}G_{ds}^{m}C_{ds}A_{ds}Aₖₛ | 31.4 | 2584 | 2599 | 464 | 920 |
| | AₖₛAₖ | | | | | |
| 486130 | AₖₛAₖₛGₖₛ^{m}C_{ds}G_{ds}G_{ds}G_{ds}T_{ds}T_{ds}T_{ds}G_{ds}G_{ds}^{m}C_{ds}Aₖₛ | 35.7 | 2585 | 2600 | 465 | 921 |
| | AₖₛAₖ | | | | | |
| 486133 | ^{m}CₖₛTₖₛ^{m}Cₖₛ^{m}C_{ds}G_{ds}A_{ds}G_{ds}A_{ds}G_{ds}^{m}C_{ds}A_{ds}G_{ds}^{m}C_{ds} | 45.9 | 2631 | 2646 | 466 | 922 |
| | Gₖₛ^{m}CₖₛAₖ | | | | | |
| 486134 | Gₖₛ^{m}CₖₛTₖₛ^{m}C_{ds}^{m}C_{ds}G_{ds}A_{ds}G_{ds}A_{ds}G_{ds}^{m}C_{ds}A_{ds}G_{ds}^{m} | 29.5 | 2632 | 2647 | 467 | 923 |
| | CₖₛGₖₛ^{m}Cₖ | | | | | |
| 486135 | GₖₛGₖₛ^{m}CₖₛT_{ds}^{m}C_{ds}^{m}C_{ds}G_{ds}A_{ds}G_{ds}A_{ds}G_{ds}^{m}C_{ds}A_{ds} | 51.4 | 2633 | 2648 | 468 | 924 |
| | Gₖₛ^{m}CₖₛGₖ | | | | | |
| 486142 | TₖₛAₖₛAₖₛA_{ds}T_{ds}A_{ds}T_{ds}^{m}C_{ds}^{m}C_{ds}A_{ds}A_{ds}A_{ds}^{m}C_{ds}^{m} | 64.4 | 2671 | 2686 | 469 | 925 |
| | CₖₛGₖₛ^{m}Cₖ | | | | | |
| 486147 | GₖₛTₖₛ^{m}CₖₛA_{ds}A_{ds}T_{ds}A_{ds}A_{ds}A_{ds}T_{ds}A_{ds}T_{ds}^{m}C_{ds}^{m}Cₖₛ | 16.1 | 2676 | 2691 | 470 | 926 |
| | AₖₛAₖ | | | | | |
| 486148 | AₖₛGₖₛGₖₛT_{ds}^{m}C_{ds}A_{ds}A_{ds}T_{ds}A_{ds}A_{ds}A_{ds}T_{ds}A_{ds}Tₖₛ^{m} | 18.3 | 2678 | 2693 | 471 | 927 |
| | Cₖₛ^{m}Cₖ | | | | | |
| 486149 | ^{m}CₖₛGₖₛAₖₛG_{ds}G_{ds}T_{ds}^{m}C_{ds}A_{ds}A_{ds}T_{ds}A_{ds}A_{ds}A_{ds}Tₖₛ | 37.9 | 2680 | 2695 | 472 | 928 |
| | AₖₛTₖ | | | | | |
| 486150 | Aₖₛ^{m}CₖₛGₖₛA_{ds}G_{ds}G_{ds}T_{ds}^{m}C_{ds}A_{ds}A_{ds}T_{ds}A_{ds}A_{ds}Aₖₛ | 45.3 | 2681 | 2696 | 473 | 929 |
| | TₖₛAₖ | | | | | |
| 486151 | GₖₛAₖₛ^{m}CₖₛG_{ds}A_{ds}G_{ds}G_{ds}T_{ds}^{m}C_{ds}A_{ds}A_{ds}T_{ds}A_{ds}Aₖₛ | 52.2 | 2682 | 2697 | 474 | 930 |
| | AₖₛTₖ | | | | | |
| 486152 | GₖₛGₖₛAₖₛ^{m}C_{ds}G_{ds}A_{ds}G_{ds}G_{ds}T_{ds}^{m}C_{ds}A_{ds}A_{ds}T_{ds}Aₖₛ | 19.8 | 2683 | 2698 | 475 | 931 |
| | AₖₛAₖ | | | | | |
| 486153 | AₖₛGₖₛGₖₛA_{ds}^{m}C_{ds}G_{ds}A_{ds}G_{ds}G_{ds}T_{ds}^{m}C_{ds}A_{ds}A_{ds}Tₖₛ | 19.9 | 2684 | 2699 | 476 | 932 |
| | AₖₛAₖ | | | | | |
| 486154 | GₖₛAₖₛGₖₛG_{ds}A_{ds}^{m}C_{ds}G_{ds}A_{ds}G_{ds}G_{ds}T_{ds}^{m}C_{ds}A_{ds}Aₖₛ | 19.6 | 2685 | 2700 | 477 | 933 |
| | TₖₛAₖ | | | | | |
| 486155 | GₖₛGₖₛAₖₛG_{ds}G_{ds}A_{ds}^{m}C_{ds}G_{ds}A_{ds}G_{ds}G_{ds}T_{ds}^{m}C_{ds}Aₖₛ | 38.3 | 2686 | 2701 | 478 | 934 |
| | AₖₛTₖ | | | | | |
| 486156 | ^{m}CₖₛGₖₛGₖₛA_{ds}G_{ds}G_{ds}A_{ds}^{m}C_{ds}G_{ds}A_{ds}G_{ds}G_{ds}T_{ds}^{m}Cₖₛ | 14.1 | 2687 | 2702 | 479 | 935 |
| | AₖₛAₖ | | | | | |
| 486157 | Tₖₛ^{m}CₖₛGₖₛG_{ds}A_{ds}G_{ds}G_{ds}A_{ds}^{m}C_{ds}G_{ds}A_{ds}G_{ds}G_{ds}Tₖₛ | 23.2 | 2688 | 2703 | 480 | 936 |
| | ^{m}CₖₛAₖ | | | | | |
| 486158 | GₖₛTₖₛ^{m}CₖₛG_{ds}G_{ds}A_{ds}G_{ds}G_{ds}A_{ds}^{m}C_{ds}G_{ds}A_{ds}G_{ds}Gₖₛ | 34.5 | 2689 | 2704 | 481 | 937 |
| | Tₖₛ^{m}Cₖ | | | | | |
| 486159 | AₖₛGₖₛTₖₛ^{m}C_{ds}G_{ds}G_{ds}A_{ds}G_{ds}G_{ds}A_{ds}^{m}C_{ds}G_{ds}A_{ds}Gₖₛ | 23.7 | 2690 | 2705 | 482 | 938 |
| | GₖₛTₖ | | | | | |
| 486160 | GₖₛAₖₛGₖₛT_{ds}^{m}C_{ds}G_{ds}G_{ds}A_{ds}G_{ds}G_{ds}A_{ds}^{m}C_{ds}G_{ds}Aₖₛ | 14.3 | 2691 | 2706 | 483 | 939 |
| | GₖₛGₖ | | | | | |
| 486161 | ^{m}CₖₛGₖₛAₖₛG_{ds}T_{ds}^{m}C_{ds}G_{ds}G_{ds}A_{ds}G_{ds}G_{ds}A_{ds}^{m}C_{ds}Gₖₛ | 29 | 2692 | 2707 | 484 | 940 |
| | AₖₛGₖ | | | | | |
| 486162 | AₖₛGₖₛ^{m}CₖₛG_{ds}A_{ds}G_{ds}T_{ds}^{m}C_{ds}G_{ds}G_{ds}A_{ds}G_{ds}G_{ds}Aₖₛ | 20.6 | 2694 | 2709 | 485 | 941 |
| | ^{m}CₖₛGₖ | | | | | |
| 486163 | ^{m}CₖₛAₖₛGₖₛ^{m}C_{ds}G_{ds}A_{ds}G_{ds}T_{ds}^{m}C_{ds}G_{ds}G_{ds}A_{ds}G_{ds}Gₖₛ | 29 | 2695 | 2710 | 486 | 942 |
| | Aₖₛ^{m}Cₖ | | | | | |
| 486164 | Tₖₛ^{m}CₖₛAₖₛG_{ds}^{m}C_{ds}G_{ds}A_{ds}G_{ds}T_{ds}^{m}C_{ds}G_{ds}G_{ds}A_{ds}Gₖₛ | 17 | 2696 | 2711 | 487 | 943 |
| | GₖₛAₖ | | | | | |
| 486165 | GₖₛTₖₛ^{m}CₖₛA_{ds}G_{ds}^{m}C_{ds}G_{ds}A_{ds}G_{ds}T_{ds}^{m}C_{ds}G_{ds}G_{ds}Aₖₛ | 14.2 | 2697 | 2712 | 426 | 944 |
| | GₖₛGₖ | | | | | |
| 486166 | TₖₛGₖₛTₖₛ^{m}C_{ds}A_{ds}G_{ds}^{m}C_{ds}G_{ds}A_{ds}G_{ds}T_{ds}^{m}C_{ds}G_{ds}Gₖₛ | 25.1 | 2698 | 2713 | 488 | 945 |
| | AₖₛGₖ | | | | | |
| 486167 | ^{m}CₖₛTₖₛGₖₛT_{ds}^{m}C_{ds}A_{ds}G_{ds}^{m}C_{ds}G_{ds}A_{ds}G_{ds}T_{ds}^{m}C_{ds} | 15 | 2699 | 2714 | 489 | 946 |
| | GₖₛGₖₛAₖ | | | | | |
| 486168 | ^{m}Cₖₛ^{m}CₖₛTₖₛG_{ds}T_{ds}^{m}C_{ds}A_{ds}G_{ds}^{m}C_{ds}G_{ds}A_{ds}G_{ds}T_{ds}^{m} | 12.4 | 2700 | 2715 | 427 | 947 |
| | CₖₛGₖₛGₖ | | | | | |
| 486169 | Gₖₛ^{m}Cₖₛ^{m}CₖₛT_{ds}G_{ds}T_{ds}^{m}C_{ds}A_{ds}G_{ds}^{m}C_{ds}G_{ds}A_{ds}G_{ds} | 24.5 | 2701 | 2716 | 428 | 948 |
| | Tₖₛ^{m}CₖₛGₖ | | | | | |
| 486170 | AₖₛGₖₛ^{m}Cₖₛ^{m}C_{ds}T_{ds}G_{ds}T_{ds}^{m}C_{ds}A_{ds}G_{ds}^{m}C_{ds}G_{ds}A_{ds} | 16.3 | 2702 | 2717 | 429 | 949 |
| | GₖₛTₖₛ^{m}Cₖ | | | | | |
| 486171 | ^{m}CₖₛAₖₛGₖₛT_{ds}G_{ds}^{m}C_{ds}A_{ds}T_{ds}^{m}C_{ds}^{m}C_{ds}A_{ds}A_{ds}A_{ds} | 31.8 | 2744 | 2759 | 490 | 950 |
| | Aₖₛ^{m}CₖₛGₖ | | | | | |
| 486172 | Tₖₛ^{m}CₖₛAₖₛG_{ds}T_{ds}G_{ds}^{m}C_{ds}A_{ds}T_{ds}^{m}C_{ds}^{m}C_{ds}A_{ds}A_{ds} | 23.1 | 2745 | 2760 | 491 | 951 |
| | AₖₛAₖₛ^{m}Cₖ | | | | | |
| 486173 | ^{m}CₖₛTₖₛ^{m}CₖₛA_{ds}G_{ds}T_{ds}G_{ds}^{m}C_{ds}A_{ds}T_{ds}^{m}C_{ds}^{m}C_{ds}A_{ds} | 23 | 2746 | 2761 | 492 | 952 |
| | AₖₛAₖₛAₖ | | | | | |
| 486174 | Tₖₛ^{m}CₖₛTₖₛ^{m}C_{ds}A_{ds}G_{ds}T_{ds}G_{ds}^{m}C_{ds}A_{ds}T_{ds}^{m}C_{ds}^{m}C_{ds} | 50.9 | 2747 | 2762 | 493 | 953 |
| | AₖₛAₖₛAₖ | | | | | |
| 486175 | GₖₛTₖₛ^{m}CₖₛT_{ds}^{m}C_{ds}A_{ds}G_{ds}T_{ds}G_{ds}^{m}C_{ds}A_{ds}T_{ds}^{m}C_{ds}^{m} | 17.2 | 2748 | 2763 | 494 | 954 |
| | CₖₛAₖₛAₖ | | | | | |
| 486176 | GₖₛGₖₛGₖₛT_{ds}^{m}C_{ds}T_{ds}^{m}C_{ds}A_{ds}G_{ds}T_{ds}G_{ds}^{m}C_{ds}A_{ds}Tₖₛ | 37.6 | 2750 | 2765 | 430 | 955 |
| | ^{m}Cₖₛ^{m}Cₖ | | | | | |
| 486177 | ^{m}CₖₛAₖₛAₖₛT_{ds}A_{ds}A_{ds}A_{ds}T_{ds}A_{ds}^{m}C_{ds}^{m}C_{ds}G_{ds}A_{ds}Gₖₛ | 40 | 2772 | 2787 | 495 | 956 |
| | GₖₛAₖ | | | | | |
| 486178 | Aₖₛ^{m}CₖₛAₖₛA_{ds}T_{ds}A_{ds}A_{ds}A_{ds}T_{ds}A_{ds}^{m}C_{ds}^{m}C_{ds}G_{ds}Aₖₛ | 11.3 | 2773 | 2788 | 23 | 881 |
| | GₖₛGₖ | | | | | |
| 486179 | AₖₛGₖₛAₖₛ^{m}C_{ds}A_{ds}A_{ds}T_{ds}A_{ds}A_{ds}A_{ds}T_{ds}A_{ds}^{m}C_{ds}^{m}Cₖₛ | 13.5 | 2775 | 2790 | 496 | 957 |
| | GₖₛAₖ | | | | | |
| 486180 | ^{m}CₖₛAₖₛGₖₛA_{ds}^{m}C_{ds}A_{ds}A_{ds}T_{ds}A_{ds}A_{ds}A_{ds}T_{ds}A_{ds}^{m}Cₖₛ | 18.6 | 2776 | 2791 | 497 | 958 |
| | ^{m}CₖₛGk | | | | | |

### Example 9: ASOs Designed to Target a Human DMPK RNA Transcript

[0676] A series of antisense oligonucleotides (ASOs) were designed to target hDMPK. The newly designed ASOs were prepared using standard oligonucleotide synthesis well known in the art and are described in Table 13 to 18, below. Subscripts “s” indicate phosphorothioate internucleoside linkages; subscripts “k” indicate 6′-(S)—CH₃ bicyclic nucleosides (cEt); subscripts “e” indicate 2′-methoxyethyl (MOE) modified nucleosides; and subscripts “d” indicate β-D-2′-deoxyribonucleosides. “^{m}C” indicates 5-methylcytosine nucleosides.

[0677] The antisense oligonucleotides targeted to a human DMPK nucleic acid were tested for their effect on DMPK RNA transcript in vitro. Cultured HepG2 cells at a density of 20,000 cells per well were transfected using electroporation with 4,500 nM antisense oligonucleotide. After approximately 24 hours, RNA was isolated from the cells and DMPK transcript levels were measured by quantitative real-time PCR. DMPK RNA transcript levels were adjusted according to total RNA content, as measured by RIBOGREEN®. Results are presented as percent expression of DMPK, relative to untreated control cells, with “% Target Expression” representing the percent expression of DMPK relative to untreated control cells

[0678] All the antisense oligonucleotides listed in Table 13 target SEQ TD NO: 1 (GENBANK Accession No. NM_001081560.1). All the antisense oligonucleotides listed in Table 14 to 18 target SEQ ID NO: 2 (the complement of GENBANK Accession No. NT_011109.15 truncated from nucleotides 18540696 to 18555106). ‘Target start site’ indicates the 5′-most nucleoside to which the antisense oligonucleotide is targeted in the human genomic gene sequence. ‘Target stop site’ indicates the 3′-most nucleoside to which the antisense oligonucleotide is targeted in the human genomic sequence.

TABLE 13
Inhibition of human DMPK RNA transcript in HepG2 cells targeting SEQ ID NO: 1

| | | | Start | Stop | | |
|---|---|---|---|---|---|---|
| | | | Site | Site | | |
| | | | on | on | | |
| | | | Sec | Seq | | Modified |
| ISIS | | % Target | ID: | ID: | Unmodified | Seq ID |
| No. | Sequence | Expression | 1 | 1 | Seq ID No. | No |
| UTC | N/A | 100 | N/A | N/A | | |
| 445569 | ^{m}CₑₛGₑₛGₑₛAₑₛGₑₛ^{m}C_{ds}G_{ds}G_{ds}T_{ds}T_{ds}G_{ds}T_{ds}G_{ds}A_{ds}A_{ds} | 36.7 | 2163 | 2182 | 24 | 1443 |
| | ^{m}CₑₛTₑₛGₑₛGₑₛ^{m}Cₑ | | | | | |
| 486178 | Aₖₛ^{m}CₖₛAₖₛA_{ds}T_{ds}A_{ds}A_{ds}A_{ds}T_{ds}A_{ds}^{m}C_{ds}^{m}C_{ds}G_{ds}Aₖₛ | 21.3 | 2773 | 2788 | 23 | 881 |
| | GₖₛGₖ | | | | | |
| 569403 | ^{m}CₖₛAₖₛ^{m}CₖₛG_{ds}G_{ds}A_{ds}A_{ds}G_{ds}^{m}C_{ds}A_{ds}^{m}C_{ds}G_{ds}A_{ds}^{m} | 18.8 | 542 | 557 | 498 | 959 |
| | CₖₛAₖₛ^{m}Cₖ | | | | | |
| 569404 | Tₖₛ^{m}CₖₛAₖₛ^{m}C_{ds}G_{ds}G_{ds}A_{ds}A_{ds}G_{ds}^{m}C_{ds}A_{ds}^{m}C_{ds}G_{ds}Aₖₛ | 25.2 | 543 | 558 | 499 | 960 |
| | ^{m}CₖₛAₖ | | | | | |
| 569405 | ^{m}CₖₛTₖₛ^{m}CₖₛA_{ds}^{m}C_{ds}G_{ds}G_{ds}A_{ds}A_{ds}G_{ds}^{m}C_{ds}A_{ds}^{m}C_{ds}Gₖₛ | 21.2 | 544 | 559 | 500 | 961 |
| | Aₖₛ^{m}Cₖ | | | | | |
| 569406 | ^{m}Cₖₛ^{m}CₖₛTₖₛ^{m}C_{ds}T_{ds}^{m}C_{ds}^{m}C_{ds}T_{ds}^{m}C_{ds}A_{ds}^{m}C_{ds}G_{ds}G_{ds} | 27.9 | 550 | 565 | 343 | 962 |
| | AₖₛAₖₛGₖ | | | | | |
| 569407 | GₖₛTₖₛ^{m}Cₖₛ^{m}C_{ds}^{m}C_{ds}T_{ds}^{m}C_{ds}T_{ds}^{m}C_{ds}^{m}C_{ds}T_{ds}^{m}C_{ds}A_{ds}^{m} | 30.9 | 553 | 568 | 501 | 963 |
| | CₖₛGₖₛGₖ | | | | | |
| 569408 | ^{m}CₖₛGₖₛTₖₛ^{m}C_{ds}^{m}C_{ds}^{m}C_{ds}T_{ds}^{m}C_{ds}T_{ds}^{m}C_{ds}^{m}C_{ds}T_{ds}^{m}C_{ds} | 32.8 | 554 | 569 | 502 | 964 |
| | Aₖₛ^{m}CₖₛGₖ | | | | | |
| 569409 | ^{m}Cₖₛ^{m}Cₖₛ^{m}CₖₛA_{ds}T_{ds}T_{ds}^{m}C_{ds}A_{ds}^{m}C_{ds}^{m}C_{ds}A_{ds}A_{ds}^{m}C_{ds} | 33 | 568 | 583 | 503 | 965 |
| | Aₖₛ^{m}CₖₛGₖ | | | | | |
| 569410 | ^{m}Cₖₛ^{m}Cₖₛ^{m}Cₖₛ^{m}C_{ds}A_{ds}T_{ds}T_{ds}^{m}C_{ds}A_{ds}^{m}C_{ds}^{m}C_{ds}A_{ds}A_{ds} | 42.1 | 569 | 584 | 504 | 966 |
| | ^{m}CₖₛAₖₛ^{m}Cₖ | | | | | |
| 569411 | Tₖₛ^{m}Cₖₛ^{m}Cₖₛ^{m}C_{ds}^{m}C_{ds}A_{ds}T_{ds}T_{ds}^{m}C_{ds}A_{ds}^{m}C_{ds}^{m}C_{ds}A_{ds} | 68.6 | 570 | 585 | 505 | 967 |
| | Aₖₛ^{m}CₖₛAₖ | | | | | |
| 569412 | GₖₛTₖₛ^{m}Cₖₛ^{m}C_{ds}^{m}C_{ds}^{m}C_{ds}A_{ds}T_{ds}T_{ds}^{m}C_{ds}A_{ds}^{m}C_{ds}^{m}C_{ds} | 60.7 | 571 | 586 | 506 | 968 |
| | AₖₛAₖₛ^{m}Cₖ | | | | | |
| 569413 | GₖₛGₖₛTₖₛ^{m}C_{ds}^{m}C_{ds}^{m}C_{ds}^{m}C_{ds}A_{ds}T_{ds}T_{ds}^{m}C_{ds}A_{ds}^{m}C_{ds}^{m} | 65.1 | 572 | 587 | 507 | 969 |
| | CₖₛAₖₛAₖ | | | | | |
| 569414 | ^{m}CₖₛGₖₛGₖₛT_{ds}^{m}C_{ds}^{m}C_{ds}^{m}C_{ds}^{m}C_{ds}A_{ds}T_{ds}T_{ds}^{m}C_{ds}A_{ds}^{m} | 54.4 | 573 | 588 | 508 | 970 |
| | Cₖₛ^{m}CₖₛAₖ | | | | | |
| 569415 | ^{m}Cₖₛ^{m}CₖₛGₖₛG_{ds}T_{ds}^{m}C_{ds}^{m}C_{ds}^{m}C_{ds}^{m}C_{ds}A_{ds}T_{ds}T_{ds}^{m}C_{ds} | 51.3 | 574 | 589 | 509 | 971 |
| | Aₖₛ^{m}Cₖₛ^{m}Cₖ | | | | | |
| 569416 | Gₖₛ^{m}Cₖₛ^{m}CₖₛG_{ds}G_{ds}T_{ds}^{m}C_{ds}^{m}C_{ds}^{m}C_{ds}^{m}C_{ds}A_{ds}T_{ds}T_{ds}^{m} | 57.9 | 575 | 590 | 510 | 972 |
| | CₖₛAₖₛ^{m}Cₖ | | | | | |
| 569417 | ^{m}CₖₛGₖₛ^{m}Cₖₛ^{m}C_{ds}G_{ds}G_{ds}T_{ds}^{m}C_{ds}^{m}C_{ds}^{m}C_{ds}^{m}C_{ds}A_{ds}T_{ds} | 43.2 | 576 | 591 | 511 | 973 |
| | Tₖₛ^{m}CₖₛAₖ | | | | | |
| 569418 | ^{m}Cₖₛ^{m}CₖₛGₖₛ^{m}C_{ds}^{m}C_{ds}G_{ds}G_{ds}T_{ds}^{m}C_{ds}^{m}C_{ds}^{m}C_{ds}^{m}C_{ds}A_{ds} | 79.3 | 577 | 592 | 512 | 974 |
| | TₖₛTₖₛ^{m}Cₖ | | | | | |
| 569419 | Aₖₛ^{m}Cₖₛ^{m}CₖₛG_{ds}^{m}C_{ds}^{m}C_{ds}G_{ds}G_{ds}T_{ds}^{m}C_{ds}^{m}C_{ds}^{m}C_{ds}^{m}C_{ds} | 36 | 578 | 593 | 513 | 975 |
| | AₖₛTₖₛTₖ | | | | | |
| 569420 | ^{m}CₖₛAₖₛ^{m}Cₖₛ^{m}C_{ds}G_{ds}^{m}C_{ds}^{m}C_{ds}G_{ds}G_{ds}T_{ds}^{m}C_{ds}^{m}C_{ds}^{m}C_{ds} | 36.2 | 579 | 594 | 514 | 976 |
| | ^{m}CₖₛAₖₛTₖ | | | | | |
| 569421 | ^{m}Cₖₛ^{m}CₖₛAₖₛ^{m}C_{ds}^{m}C_{ds}G_{ds}^{m}C_{ds}^{m}C_{ds}G_{ds}G_{ds}T_{ds}^{m}C_{ds}^{m}C_{ds} | 34.7 | 580 | 595 | 515 | 977 |
| | ^{m}Cₖₛ^{m}CₖₛAₖ | | | | | |
| 569422 | Tₖₛ^{m}Cₖₛ^{m}CₖₛA_{ds}^{m}C_{ds}^{m}C_{ds}G_{ds}^{m}C_{ds}^{m}C_{ds}G_{ds}G_{ds}T_{ds}^{m}C_{ds} | 40 | 581 | 596 | 516 | 978 |
| | ^{m}Cₖₛ^{m}Cₖₛ^{m}Cₖ | | | | | |
| 569423 | AₖₛTₖₛ^{m}Cₖₛ^{m}C_{ds}A_{ds}^{m}C_{ds}^{m}C_{ds}G_{ds}^{m}C_{ds}^{m}C_{ds}G_{ds}G_{ds}T_{ds}^{m} | 31.6 | 582 | 597 | 517 | 979 |
| | Cₖₛ^{m}Cₖₛ^{m}Cₖ | | | | | |
| 569424 | GₖₛAₖₛTₖₛ^{m}C_{ds}^{m}C_{ds}A_{ds}^{m}C_{ds}^{m}C_{ds}G_{ds}^{m}C_{ds}C_{ds}G_{ds}G_{ds} | 56 | 583 | 598 | 518 | 980 |
| | Tₖₛ^{m}Cₖₛ^{m}Cₖ | | | | | |
| 569425 | TₖₛGₖₛAₖₛT_{ds}^{m}C_{ds}^{m}C_{ds}A_{ds}^{m}C_{ds}^{m}C_{ds}G_{ds}^{m}C_{ds}^{m}C_{ds}G_{ds} | 53.9 | 584 | 599 | 519 | 981 |
| | GₖₛTₖₛ^{m}Cₖ | | | | | |
| 569426 | GₖₛTₖₛGₖₛA_{ds}T_{ds}^{m}C_{ds}^{m}C_{ds}A_{ds}^{m}C_{ds}^{m}C_{ds}G_{ds}^{m}C_{ds}^{m}C_{ds} | 54.1 | 585 | 600 | 520 | 982 |
| | GₖₛGₖₛTₖ | | | | | |
| 569427 | ^{m}CₖₛGₖₛTₖₛG_{ds}A_{ds}T_{ds}^{m}C_{ds}^{m}C_{ds}A_{ds}^{m}C_{ds}^{m}C_{ds}G_{ds}^{m}C_{ds}^{m} | 34.8 | 586 | 601 | 521 | 983 |
| | CₖₛGₖₛGₖ | | | | | |
| 569428 | ^{m}CₖₛAₖₛTₖₛ^{m}C_{ds}^{m}C_{ds}T_{ds}G_{ds}G_{ds}A_{ds}A_{ds}G_{ds}G_{ds}^{m}C_{ds}Gₖₛ | 71 | 611 | 626 | 522 | 984 |
| | AₖₛAₖ | | | | | |
| 569429 | Tₖₛ^{m}CₖₛAₖₛT_{ds}^{m}C_{ds}^{m}C_{ds}T_{ds}G_{ds}G_{ds}A_{ds}A_{ds}G_{ds}G_{ds}^{m}Cₖₛ | 51.1 | 612 | 627 | 523 | 985 |
| | GₖₛAₖ | | | | | |
| 569430 | AₖₛGₖₛTₖₛT_{ds}^{m}C_{ds}T_{ds}^{m}C_{ds}A_{ds}T_{ds}^{m}C_{ds}^{m}C_{ds}T_{ds}G_{ds}Gₖₛ | 69.2 | 617 | 632 | 524 | 986 |
| | AₖₛAₖ | | | | | |
| 569431 | TₖₛAₖₛGₖₛT_{ds}T_{ds}^{m}C_{ds}T_{ds}^{m}C_{ds}A_{ds}T_{ds}^{m}C_{ds}^{m}C_{ds}T_{ds}Gₖₛ | 48.6 | 618 | 633 | 525 | 987 |
| | GₖₛAₖ | | | | | |
| 569432 | GₖₛTₖₛAₖₛG_{ds}T_{ds}T_{ds}^{m}C_{ds}T_{ds}^{m}C_{ds}A_{ds}T_{ds}^{m}C_{ds}^{m}C_{ds}Tₖₛ | 29.6 | 619 | 634 | 526 | 988 |
| | GₖₛGₖ | | | | | |
| 569433 | ^{m}CₖₛAₖₛGₖₛG_{ds}T_{ds}A_{ds}^{m}C_{ds}A_{ds}G_{ds}G_{ds}T_{ds}A_{ds}G_{ds}TₖₛTₖₛ | 36.5 | 628 | 643 | 527 | 989 |
| | ^{m}Cₖ | | | | | |
| 569434 | ^{m}Cₖₛ^{m}CₖₛAₖₛG_{ds}G_{ds}T_{ds}A_{ds}^{m}C_{ds}A_{ds}G_{ds}G_{ds}T_{ds}A_{ds}Gₖₛ | 51 | 629 | 644 | 528 | 990 |
| | TₖₛTₖ | | | | | |
| 569435 | GₖₛAₖₛ^{m}Cₖₛ^{m}C_{ds}A_{ds}G_{ds}G_{ds}T_{ds}A_{ds}^{m}C_{ds}A_{ds}G_{ds}G_{ds}Tₖₛ | 49.9 | 631 | 646 | 529 | 991 |
| | AₖₛGₖ | | | | | |
| 569436 | ^{m}CₖₛTₖₛ^{m}Cₖₛ^{m}C_{ds}A_{ds}T_{ds}G_{ds}A_{ds}^{m}C_{ds}^{m}C_{ds}A_{ds}G_{ds}G_{ds}Tₖₛ | 41 | 637 | 652 | 530 | 992 |
| | Aₖₛ^{m}Cₖ | | | | | |
| 569437 | Aₖₛ^{m}CₖₛTₖₛ^{m}C_{ds}^{m}C_{ds}A_{ds}T_{ds}G_{ds}A_{ds}^{m}C_{ds}^{m}C_{ds}A_{ds}G_{ds}Gₖₛ | 32.9 | 638 | 653 | 531 | 993 |
| | TₖₛAₖ | | | | | |
| 569438 | TₖₛAₖₛ^{m}CₖₛT_{ds}^{m}C_{ds}^{m}C_{ds}A_{ds}T_{ds}G_{ds}A_{ds}^{m}C_{ds}^{m}C_{ds}A_{ds}Gₖₛ | 25.7 | 639 | 654 | 532 | 994 |
| | GₖₛTₖ | | | | | |
| 569439 | AₖₛTₖₛAₖₛ^{m}C_{ds}T_{ds}^{m}C_{ds}^{m}C_{ds}A_{ds}T_{ds}G_{ds}A_{ds}^{m}C_{ds}^{m}C_{ds}Aₖₛ | 9.4 | 640 | 655 | 533 | 995 |
| | GₖₛGₖ | | | | | |
| 569440 | AₖₛAₖₛTₖₛA_{ds}^{m}C_{ds}T_{ds}^{m}C_{ds}^{m}C_{ds}A_{ds}T_{ds}G_{ds}A_{ds}^{m}C_{ds}^{m}Cₖₛ | 21.2 | 641 | 656 | 534 | 996 |
| | AₖₛGₖ | | | | | |
| 569441 | TₖₛAₖₛAₖₛT_{ds}A_{ds}^{m}C_{ds}T_{ds}^{m}C_{ds}^{m}C_{ds}A_{ds}T_{ds}G_{ds}A_{ds}^{m}Cₖₛ^{m} | 30.8 | 642 | 657 | 535 | 997 |
| | CₖₛAₖ | | | | | |
| 569442 | GₖₛTₖₛAₖₛA_{ds}T_{ds}A_{ds}^{m}C_{ds}T_{ds}^{m}C_{ds}^{m}C_{ds}A_{ds}T_{ds}G_{ds}Aₖₛ^{m} | 29.8 | 643 | 658 | 536 | 998 |
| | Cₖₛ^{m}Cₖ | | | | | |
| 569443 | ^{m}CₖₛGₖₛTₖₛA_{ds}A_{ds}T_{ds}A_{ds}^{m}C_{ds}T_{ds}^{m}C_{ds}^{m}C_{ds}A_{ds}T_{ds}Gₖₛ | 25.3 | 644 | 659 | 537 | 999 |
| | Aₖₛ^{m}Cₖ | | | | | |
| 569444 | ^{m}CₖₛTₖₛTₖₛG_{ds}^{m}C_{ds}T_{ds}^{m}C_{ds}A_{ds}G_{ds}^{m}C_{ds}A_{ds}G_{ds}T_{ds}Gₖₛ | 19.3 | 676 | 691 | 538 | 1000 |
| | Tₖₛ^{m}Cₖ | | | | | |
| 569445 | Aₖₛ^{m}CₖₛTₖₛT_{ds}G_{ds}^{m}C_{ds}T_{ds}^{m}C_{ds}A_{ds}G_{ds}^{m}C_{ds}A_{ds}G_{ds}Tₖₛ | 35 | 677 | 692 | 539 | 1001 |
| | GₖₛTₖ | | | | | |
| 569446 | AₖₛAₖₛ^{m}CₖₛT_{ds}T_{ds}G_{ds}^{m}C_{ds}T_{ds}^{m}C_{ds}A_{ds}G_{ds}^{m}C_{ds}A_{ds}Gₖₛ | 30 | 678 | 693 | 540 | 1002 |
| | TₖₛGₖ | | | | | |
| 569447 | AₖₛAₖₛAₖₛ^{m}C_{ds}T_{ds}T_{ds}G_{ds}^{m}C_{ds}T_{ds}^{m}C_{ds}A_{ds}G_{ds}^{m}C_{ds}Aₖₛ | 32.2 | 679 | 694 | 344 | 1003 |
| | GₖₛTₖ | | | | | |
| 569448 | ^{m}Cₖₛ^{m}CₖₛAₖₛA_{ds}A_{ds}^{m}C_{ds}T_{ds}T_{ds}G_{ds}^{m}C_{ds}T_{ds}^{m}C_{ds}A_{ds}Gₖₛ | 30.1 | 681 | 696 | 346 | 1004 |
| | ^{m}CₖₛAₖ | | | | | |
| 569449 | ^{m}Cₖₛ^{m}Cₖₛ^{m}CₖₛA_{ds}A_{ds}A_{ds}^{m}C_{ds}T_{ds}T_{ds}G_{ds}^{m}C_{ds}T_{ds}^{m}C_{ds} | 18.4 | 682 | 697 | 347 | 1005 |
| | AₖₛGₖₛ^{m}Cₖ | | | | | |
| 569450 | ^{m}Cₖₛ^{m}Cₖₛ^{m}Cₖₛ^{m}C_{ds}A_{ds}A_{ds}A_{ds}^{m}C_{ds}T_{ds}T_{ds}G_{ds}^{m}C_{ds}T_{ds}^{m} | 44.8 | 683 | 698 | 348 | 1006 |
| | CₖₛAₖₛGₖ | | | | | |
| 569451 | Gₖₛ^{m}CₖₛTₖₛ^{m}C_{ds}^{m}C_{ds}^{m}C_{ds}^{m}C_{ds}A_{ds}A_{ds}A_{ds}^{m}C_{ds}T_{ds}T_{ds} | 47 | 686 | 701 | 541 | 1007 |
| | Gₖₛ^{m}CₖₛTₖ | | | | | |
| 569452 | ^{m}CₖₛGₖₛ^{m}CₖₛT_{ds}^{m}C_{ds}^{m}C_{ds}^{m}C_{ds}^{m}C_{ds}A_{ds}A_{ds}A_{ds}^{m}C_{ds}T_{ds} | 35.4 | 687 | 702 | 542 | 1008 |
| | TₖₛGₖₛ^{m}Cₖ | | | | | |
| 569453 | ^{m}Cₖₛ^{m}CₖₛGₖₛ^{m}C_{ds}T_{ds}^{m}C_{ds}^{m}C_{ds}^{m}C_{ds}^{m}C_{ds}A_{ds}A_{ds}A_{ds}^{m}C_{ds} | 46.6 | 688 | 703 | 543 | 1009 |
| | TₖₛTₖₛGₖ | | | | | |
| 569454 | Tₖₛ^{m}Cₖₛ^{m}CₖₛG_{ds}^{m}C_{ds}T_{ds}^{m}C_{ds}^{m}C_{ds}^{m}C_{ds}^{m}C_{ds}A_{ds}A_{ds}A_{ds} | 29.4 | 689 | 704 | 544 | 1010 |
| | ^{m}CₖₛTₖₛTₖ | | | | | |
| 569455 | AₖₛTₖₛ^{m}Cₖₛ^{m}C_{ds}G_{ds}^{m}C_{ds}T_{ds}^{m}C_{ds}^{m}C_{ds}^{m}C_{ds}^{m}C_{ds}A_{ds}A_{ds} | 36.9 | 690 | 705 | 545 | 1011 |
| | Aₖₛ^{m}CₖₛTₖ | | | | | |
| 569456 | AₖₛAₖₛTₖₛ^{m}C_{ds}^{m}C_{ds}G_{ds}^{m}C_{ds}T_{ds}^{m}C_{ds}^{m}C_{ds}^{m}C_{ds}^{m}C_{ds}A_{ds} | 32.9 | 691 | 706 | 546 | 1012 |
| | AₖₛAₖₛ^{m}Cₖ | | | | | |
| 569457 | GₖₛAₖₛAₖₛT_{ds}^{m}C_{ds}^{m}C_{ds}G_{ds}^{m}C_{ds}T_{ds}^{m}C_{ds}^{m}C_{ds}^{m}C_{ds}^{m}C_{ds} | 41.7 | 692 | 707 | 547 | 1013 |
| | AₖₛAₖₛAₖ | | | | | |
| 569458 | GₖₛGₖₛAₖₛA_{ds}T_{ds}^{m}C_{ds}^{m}C_{ds}G_{ds}^{m}C_{ds}T_{ds}^{m}C_{ds}^{m}C_{ds}^{m}C_{ds}^{m} | 36.4 | 693 | 708 | 548 | 1014 |
| | CₖₛAₖₛAₖ | | | | | |
| 569459 | ^{m}CₖₛGₖₛGₖₛA_{ds}A_{ds}T_{ds}^{m}C_{ds}^{m}C_{ds}G_{ds}^{m}C_{ds}T_{ds}^{m}C_{ds}^{m}C_{ds}^{m} | 30 | 694 | 709 | 549 | 1015 |
| | Cₖₛ^{m}CₖₛAₖ | | | | | |
| 569460 | ^{m}Cₖₛ^{m}CₖₛGₖₛG_{ds}A_{ds}A_{ds}T_{ds}^{m}C_{ds}^{m}C_{ds}G_{ds}^{m}C_{ds}T_{ds}^{m}C_{ds}^{m} | 26.5 | 695 | 710 | 550 | 1016 |
| | Cₖₛ^{m}Cₖₛ^{m}Cₖ | | | | | |
| 569461 | Gₖₛ^{m}Cₖₛ^{m}CₖₛG_{ds}G_{ds}A_{ds}A_{ds}T_{ds}^{m}C_{ds}^{m}C_{ds}G_{ds}^{m}C_{ds}T_{ds}^{m} | 36.5 | 696 | 711 | 551 | 1017 |
| | Cₖₛ^{m}Cₖₛ^{m}Cₖ | | | | | |
| 569462 | AₖₛGₖₛAₖₛA_{ds}G_{ds}^{m}C_{ds}G_{ds}^{m}C_{ds}G_{ds}^{m}C_{ds}^{m}C_{ds}A_{ds}T_{ds}^{m}Cₖₛ | 26 | 713 | 728 | 552 | 1018 |
| | Tₖₛ^{m}Cₖ | | | | | |
| 569463 | TₖₛAₖₛGₖₛA_{ds}A_{ds}G_{ds}^{m}C_{ds}G_{ds}^{m}C_{ds}G_{ds}^{m}C_{ds}^{m}C_{ds}A_{ds}Tₖₛ | 40.3 | 714 | 729 | 553 | 1019 |
| | ^{m}CₖₛTₖ | | | | | |
| 569464 | GₖₛTₖₛAₖₛG_{ds}A_{ds}A_{ds}G_{ds}^{m}C_{ds}G_{ds}^{m}C_{ds}G_{ds}^{m}C_{ds}^{m}C_{ds}Aₖₛ | 28.9 | 715 | 730 | 554 | 1020 |
| | Tₖₛ^{m}Cₖ | | | | | |
| 569465 | GₖₛGₖₛTₖₛA_{ds}G_{ds}A_{ds}A_{ds}G_{ds}^{m}C_{ds}G_{ds}^{m}C_{ds}G_{ds}^{m}C_{ds}^{m}Cₖₛ | 35.7 | 716 | 731 | 555 | 1021 |
| | AₖₛTₖ | | | | | |
| 569466 | AₖₛGₖₛGₖₛT_{ds}A_{ds}G_{ds}A_{ds}A_{ds}G_{ds}^{m}C_{ds}G_{ds}^{m}C_{ds}G_{ds}^{m}Cₖₛ^{m} | 31.1 | 717 | 732 | 556 | 1022 |
| | CₖₛAₖ | | | | | |
| 569467 | ^{m}CₖₛAₖₛGₖₛG_{ds}T_{ds}A_{ds}G_{ds}A_{ds}A_{ds}G_{ds}^{m}C_{ds}G_{ds}^{m}C_{ds}Gₖₛ^{m} | 14.8 | 718 | 733 | 557 | 1023 |
| | Cₖₛ^{m}Cₖ | | | | | |
| 569468 | ^{m}Cₖₛ^{m}CₖₛAₖₛG_{ds}G_{ds}T_{ds}A_{ds}G_{ds}A_{ds}A_{ds}G_{ds}^{m}C_{ds}G_{ds}^{m}Cₖₛ | 32.1 | 719 | 734 | 558 | 1024 |
| | Gₖₛ^{m}Cₖ | | | | | |
| 569469 | Gₖₛ^{m}Cₖₛ^{m}CₖₛA_{ds}G_{ds}G_{ds}T_{ds}A_{ds}G_{ds}A_{ds}A_{ds}G_{ds}^{m}C_{ds}Gₖₛ^{m} | 54.5 | 720 | 735 | 559 | 1025 |
| | CₖₛGₖ | | | | | |
| 569470 | ^{m}CₖₛGₖₛ^{m}Cₖₛ^{m}C_{ds}A_{ds}G_{ds}G_{ds}T_{ds}A_{ds}G_{ds}A_{ds}A_{ds}G_{ds}^{m}Cₖₛ | 50.5 | 721 | 736 | 560 | 1026 |
| | Gₖₛ^{m}Cₖ | | | | | |
| 569471 | ^{m}Cₖₛ^{m}CₖₛGₖₛ^{m}C_{ds}^{m}C_{ds}A_{ds}G_{ds}G_{ds}T_{ds}A_{ds}G_{ds}A_{ds}A_{ds}Gₖₛ | 56.6 | 722 | 737 | 561 | 1027 |
| | ^{m}CₖₛGₖ | | | | | |
| 569472 | Tₖₛ^{m}Cₖₛ^{m}CₖₛG_{ds}^{m}C_{ds}^{m}C_{ds}A_{ds}G_{ds}G_{ds}T_{ds}A_{ds}G_{ds}A_{ds}Aₖₛ | 44.1 | 723 | 738 | 562 | 1028 |
| | Gₖₛ^{m}Cₖ | | | | | |
| 569473 | GₖₛAₖₛ^{m}CₖₛA_{ds}A_{ds}T_{ds}^{m}C_{ds}T_{ds}^{m}C_{ds}^{m}C_{ds}G_{ds}^{m}C_{ds}^{m}C_{ds} | 14.2 | 730 | 745 | 29 | 882 |
| | AₖₛGₖₛGₖ | | | | | |
| 569474 | TₖₛGₖₛAₖₛ^{m}C_{ds}A_{ds}A_{ds}T_{ds}^{m}C_{ds}T_{ds}^{m}C_{ds}^{m}C_{ds}G_{ds}^{m}C_{ds}^{m} | 25.9 | 731 | 746 | 563 | 1029 |
| | CₖₛAₖₛGₖ | | | | | |
| 569475 | AₖₛTₖₛGₖₛA_{ds}^{m}C_{ds}A_{ds}A_{ds}T_{ds}^{m}C_{ds}T_{ds}^{m}C_{ds}^{m}C_{ds}G_{ds}^{m}Cₖₛ | 28.7 | 732 | 747 | 564 | 1030 |
| | ^{m}CₖₛAₖ | | | | | |
| 569476 | ^{m}CₖₛAₖₛTₖₛG_{ds}A_{ds}^{m}C_{ds}A_{ds}A_{ds}T_{ds}^{m}C_{ds}T_{ds}^{m}C_{ds}^{m}C_{ds}Gₖₛ | 27.4 | 733 | 748 | 565 | 1031 |
| | ^{m}Cₖₛ^{m}Cₖ | | | | | |
| 569477 | ^{m}Cₖₛ^{m}CₖₛAₖₛT_{ds}G_{ds}A_{ds}^{m}C_{ds}A_{ds}A_{ds}T_{ds}^{m}C_{ds}T_{ds}^{m}C_{ds}^{m} | 52.4 | 734 | 749 | 566 | 1032 |
| | CₖₛGₖₛ^{m}Cₖ | | | | | |
| 569478 | Gₖₛ^{m}Cₖₛ^{m}CₖₛA_{ds}T_{ds}G_{ds}A_{ds}^{m}C_{ds}A_{ds}A_{ds}T_{ds}^{m}C_{ds}T_{ds}^{m}Cₖₛ | 50.5 | 735 | 750 | 567 | 1033 |
| | ^{m}CₖₛGₖ | | | | | |
| 569479 | GₖₛGₖₛ^{m}Cₖₛ^{m}C_{ds}A_{ds}T_{ds}G_{ds}A_{ds}^{m}C_{ds}A_{ds}A_{ds}T_{ds}^{m}C_{ds}Tₖₛ^{m} | 48.4 | 736 | 751 | 568 | 1034 |
| | Cₖₛ^{m}Ck | | | | | |

TABLE 14
Inhibition of human DMPK RNA transcript in
HepG2 cells targeting SEQ ID NO: 2

| | | | Start | Stop | Un- | |
|---|---|---|---|---|---|---|
| | | Sequence | Site | Site | modified | Modified |
| ISIS | | % Target | on Seq | on Seq | Seq ID | Seq ID |
| No. | | Expression | ID: 2 | ID: 2 | No. | No. |
| UTC | N/A | 100 | N/A | N/A | | |
| 445569 | ^{m}CₑₛGₑₛGₑₛAₑₛGₑₛ^{m}C_{ds}G_{ds}G_{ds}T_{ds}T_{ds}G_{ds}T_{ds}G_{ds} | 31.4 | 13226 | 13245 | 24 | 1443 |
| | A_{ds}A_{ds}^{m}CₑₛTₑₛGₑₛGₑₛ^{m}Cₑ | | | | | |
| 486178 | Aₖₛ^{m}CₖₛAₖₛA_{ds}T_{ds}A_{ds}A_{ds}A_{ds}T_{ds}A_{ds}^{m}C_{ds}^{m}C_{ds}G_{ds} | 25.3 | 13836 | 13851 | 23 | 881 |
| | AₖₛGₖₛGₖ | | | | | |
| 570801 | ^{m}Cₖₛ^{m}CₖₛAₖₛA_{ds}^{m}C_{ds}T_{ds}G_{ds}T_{ds}T_{ds}^{m}C_{ds}T_{ds}^{m}C_{ds}T_{ds} | 22.7 | 10165 | 10180 | 569 | 1035 |
| | TₖₛAₖₛGₖ | | | | | |
| 570802 | AₖₛAₖₛ^{m}Cₖₛ^{m}C_{ds}A_{ds}A_{ds}^{m}C_{ds}T_{ds}G_{ds}T_{ds}T_{ds}^{m}C_{ds}T_{ds} | 22.6 | 10167 | 10182 | 570 | 1036 |
| | ^{m}CₖₛTₖₛTₖ | | | | | |
| 570803 | ^{m}Cₖₛ^{m}CₖₛAₖₛG_{ds}T_{ds}A_{ds}A_{ds}T_{ds}A_{ds}A_{ds}A_{ds}A_{ds}G_{ds} | 37.4 | 10190 | 10205 | 571 | 1037 |
| | ^{m}CₖₛTₖₛGₖ | | | | | |
| 570804 | GₖₛTₖₛ^{m}Cₖₛ^{m}C_{ds}A_{ds}G_{ds}T_{ds}A_{ds}A_{ds}T_{ds}A_{ds}A_{ds}A_{ds}Aₖₛ | 24.9 | 10192 | 10207 | 572 | 1038 |
| | Gₖₛ^{m}Cₖ | | | | | |
| 570805 | GₖₛTₖₛTₖₛG_{ds}T_{ds}^{m}C_{ds}^{m}C_{ds}A_{ds}G_{ds}T_{ds}A_{ds}A_{ds}T_{ds}Aₖₛ | 23.8 | 10195 | 10210 | 573 | 1039 |
| | AₖₛAₖ | | | | | |
| 570806 | AₖₛTₖₛGₖₛT_{ds}T_{ds}G_{ds}T_{ds}^{m}C_{ds}^{m}C_{ds}A_{ds}G_{ds}T_{ds}A_{ds}Aₖₛ | 21.9 | 10197 | 10212 | 574 | 1040 |
| | TₖₛAₖ | | | | | |
| 570807 | TₖₛAₖₛAₖₛT_{ds}G_{ds}T_{ds}T_{ds}G_{ds}T_{ds}^{m}C_{ds}^{m}C_{ds}A_{ds}G_{ds}Tₖₛ | 20 | 10199 | 10214 | 575 | 1041 |
| | AₖₛAₖ | | | | | |
| 570808 | TₖₛGₖₛTₖₛA_{ds}A_{ds}T_{ds}G_{ds}T_{ds}T_{ds}G_{ds}T_{ds}^{m}C_{ds}^{m}C_{ds}Aₖₛ | 11.5 | 10201 | 10216 | 31 | 883 |
| | GₖₛTₖ | | | | | |
| 570809 | TₖₛTₖₛ^{m}CₖₛA_{ds}A_{ds}T_{ds}^{m}C_{ds}^{m}C_{ds}T_{ds}G_{ds}A_{ds}^{m}C_{ds}^{m}C_{ds} | 34.7 | 10279 | 10294 | 576 | 1042 |
| | ^{m}CₖₛAₖₛ^{m}Cₖ | | | | | |
| 570810 | GₖₛGₖₛTₖₛT_{ds}^{m}C_{ds}A_{ds}A_{ds}T_{ds}^{m}C_{ds}^{m}C_{ds}T_{ds}G_{ds}A_{ds} | 76.4 | 10281 | 10296 | 577 | 1043 |
| | ^{m}Cₖₛ^{m}Cₖₛ^{m}Cₖ | | | | | |
| 570811 | TₖₛGₖₛGₖₛG_{ds}T_{ds}T_{ds}^{m}C_{ds}A_{ds}A_{ds}T_{ds}^{m}C_{ds}^{m}C_{ds}T_{ds} | 72.4 | 10283 | 10298 | 578 | 1044 |
| | GₖₛAₖₛ^{m}Cₖ | | | | | |
| 570812 | GₖₛAₖₛTₖₛG_{ds}G_{ds}G_{ds}T_{ds}T_{ds}^{m}C_{ds}A_{ds}A_{ds}T_{ds}^{m}C_{ds} | 49 | 10285 | 10300 | 579 | 1045 |
| | ^{m}CₖₛTₖₛGₖ | | | | | |
| 570813 | AₖₛGₖₛGₖₛA_{ds}T_{ds}G_{ds}G_{ds}G_{ds}T_{ds}T_{ds}^{m}C_{ds}A_{ds}A_{ds}Tₖₛ | 80.8 | 10287 | 10302 | 580 | 1046 |
| 570814 | AₖₛGₖₛAₖₛG_{ds}G_{ds}A_{ds}T_{ds}G_{ds}G_{ds}G_{ds}T_{ds}T_{ds}^{m}C_{ds}Aₖₛ | 43.3 | 10289 | 10304 | 581 | 1047 |
| | AₖₛTₖ | | | | | |
| 570815 | AₖₛTₖₛAₖₛG_{ds}A_{ds}G_{ds}G_{ds}A_{ds}T_{ds}G_{ds}G_{ds}G_{ds}T_{ds}Tₖₛ | 63.2 | 10291 | 10306 | 582 | 1048 |
| | CₖₛAₖ | | | | | |
| 570816 | ^{m}Cₖₛ^{m}Cₖₛ^{m}CₖₛT_{ds}^{m}C_{ds}^{m}C_{ds}T_{ds}G_{ds}T_{ds}G_{ds}G_{ds}G_{ds}A_{ds} | 38.8 | 10349 | 10364 | 583 | 1049 |
| | Aₖₛ^{m}CₖₛAₖ | | | | | |
| 570817 | GₖₛTₖₛ^{m}Cₖₛ^{m}C_{ds}^{m}C_{ds}T_{ds}^{m}C_{ds}^{m}C_{ds}T_{ds}G_{ds}T_{ds}G_{ds}G_{ds} | 91 | 10351 | 10366 | 584 | 1050 |
| | GₖₛAₖₛAₖ | | | | | |
| 570818 | ^{m}CₖₛAₖₛGₖₛT_{ds}^{m}C_{ds}^{m}C_{ds}^{m}C_{ds}T_{ds}^{m}C_{ds}^{m}C_{ds}T_{ds}G_{ds} | 64.8 | 10353 | 10368 | 585 | 1051 |
| | T_{ds}GₖₛGₖₛGₖ | | | | | |
| 570819 | AₖₛGₖₛ^{m}CₖₛA_{ds}G_{ds}T_{ds}^{m}C_{ds}^{m}C_{ds}^{m}C_{ds}T_{ds}^{m}C_{ds}^{m}C_{ds} | 28.5 | 10355 | 10370 | 586 | 1052 |
| | T_{ds}GₖₛTₖₛGₖ | | | | | |
| 570820 | Aₖₛ^{m}CₖₛTₖₛ^{m}C_{ds}A_{ds}G_{ds}^{m}C_{ds}T_{ds}G_{ds}T_{ds}G_{ds}G_{ds}G_{ds} | 62.9 | 10417 | 10432 | 587 | 1053 |
| | AₖₛAₖₛGₖ | | | | | |
| 570821 | ^{m}Cₖₛ^{m}Cₖₛ^{m}CₖₛA_{ds}^{m}C_{ds}T_{ds}^{m}C_{ds}A_{ds}G_{ds}^{m}C_{ds}T_{ds}G_{ds} | 79.9 | 10420 | 10435 | 588 | 1054 |
| | T_{ds}GₖₛGₖₛGₖ | | | | | |
| 570822 | Aₖₛ^{m}Cₖₛ^{m}Cₖₛ^{m}C_{ds}^{m}C_{ds}A_{ds}^{m}C_{ds}T_{ds}^{m}C_{ds}A_{ds}G_{ds}^{m}C_{ds} | 47.5 | 10422 | 10437 | 589 | 1055 |
| | T_{ds}GₖₛTₖₛGₖ | | | | | |
| 570823 | Aₖₛ^{m}CₖₛAₖₛ^{m}C_{ds}^{m}C_{ds}^{m}C_{ds}^{m}C_{ds}A_{ds}^{m}C_{ds}T_{ds}^{m}C_{ds}A_{ds} | 78.1 | 10424 | 10439 | 590 | 1056 |
| | G_{ds}^{m}CₖₛTₖₛGₖ | | | | | |
| 570824 | Gₖₛ^{m}CₖₛAₖₛ^{m}C_{ds}A_{ds}^{m}C_{ds}^{m}C_{ds}^{m}C_{ds}^{m}C_{ds}A_{ds}^{m}C_{ds}T_{ds} | 82.5 | 10426 | 10441 | 591 | 1057 |
| | ^{m}C_{ds}AₖₛGₖₛ^{m}Cₖ | | | | | |
| 570825 | Tₖₛ^{m}CₖₛAₖₛG_{ds}^{m}C_{ds}A_{ds}^{m}C_{ds}A_{ds}^{m}C_{ds}^{m}C_{ds}^{m}C_{ds}^{m}C_{ds} | 52.6 | 10429 | 10444 | 592 | 1058 |
| | A_{ds}^{m}CₖₛTₖₛ^{m}Cₖ | | | | | |
| 570826 | GₖₛTₖₛGₖₛG_{ds}T_{ds}^{m}C_{ds}^{m}C_{ds}T_{ds}A_{ds}A_{ds}G_{ds}A_{ds}^{m}C_{ds} | 30.9 | 10474 | 10489 | 593 | 1059 |
| | TₖₛGₖₛGₖ | | | | | |
| 570827 | GₖₛAₖₛTₖₛG_{ds}T_{ds}G_{ds}G_{ds}T_{ds}^{m}C_{ds}^{m}C_{ds}T_{ds}A_{ds}A_{ds}Gₖₛ | 25.5 | 10477 | 10492 | 594 | 1060 |
| | Aₖₛ^{m}Cₖ | | | | | |
| 570828 | ^{m}CₖₛAₖₛGₖₛA_{ds}T_{ds}G_{ds}T_{ds}G_{ds}G_{ds}T_{ds}^{m}C_{ds}^{m}C_{ds}T_{ds} | 18.6 | 10479 | 10494 | 595 | 1061 |
| | AₖₛAₖₛGₖ | | | | | |
| 570829 | ^{m}Cₖₛ^{m}CₖₛTₖₛ^{m}C_{ds}^{m}C_{ds}A_{ds}^{m}C_{ds}A_{ds}G_{ds}A_{ds}T_{ds}G_{ds}T_{ds} | 44.5 | 10485 | 10500 | 596 | 1062 |
| | GₖₛGₖₛTₖ | | | | | |
| 570830 | ^{m}CₖₛAₖₛ^{m}Cₖₛ^{m}C_{ds}T_{ds}^{m}C_{ds}^{m}C_{ds}A_{ds}^{m}C_{ds}A_{ds}G_{ds}A_{ds} | 67.4 | 10487 | 10502 | 597 | 1063 |
| | T_{ds}GₖₛTₖₛGₖ | | | | | |
| 570831 | GₖₛGₖₛ^{m}Cₖₛ^{m}C_{ds}A_{ds}^{m}C_{ds}^{m}C_{ds}T_{ds}C_{ds}^{m}C_{ds}A_{ds}^{m}C_{ds} | 56.3 | 10490 | 10505 | 598 | 1064 |
| | A_{ds}GₖₛAₖₛTₖ | | | | | |
| 570832 | TₖₛGₖₛ^{m}CₖₛT_{ds}T_{ds}G_{ds}G_{ds}^{m}C_{ds}T_{ds}^{m}C_{ds}T_{ds}G_{ds}G_{ds} | 42.4 | 10501 | 10516 | 599 | 1065 |
| | ^{m}Cₖₛ^{m}CₖₛAₖ | | | | | |
| 570833 | Aₖₛ^{m}CₖₛTₖₛG_{ds}^{m}C_{ds}T_{ds}T_{ds}G_{ds}G_{ds}^{m}C_{ds}T_{ds}^{m}C_{ds}T_{ds} | 16 | 10503 | 10518 | 600 | 1066 |
| | GₖₛGₖₛ^{m}Cₖ | | | | | |
| 570834 | AₖₛGₖₛAₖₛ^{m}C_{ds}T_{ds}G_{ds}^{m}C_{ds}T_{ds}T_{ds}G_{ds}G_{ds}^{m}C_{ds}T_{ds} | 47.5 | 10505 | 10520 | 601 | 1067 |
| | ^{m}CₖₛTₖₛGₖ | | | | | |
| 570835 | GₖₛGₖₛAₖₛG_{ds}A_{ds}^{m}C_{ds}T_{ds}G_{ds}^{m}C_{ds}T_{ds}T_{ds}G_{ds}G_{ds} | 37.2 | 10507 | 10522 | 602 | 1068 |
| | ^{m}CₖₛTₖₛ^{m}Cₖ | | | | | |
| 570836 | TₖₛGₖₛ^{m}CₖₛA_{ds}G_{ds}A_{ds}^{m}C_{ds}^{m}C_{ds}^{m}C_{ds}^{m}C_{ds}T_{ds}^{m}C_{ds} | 63.1 | 10556 | 10571 | 603 | 1069 |
| | T_{ds}Tₖₛ^{m}CₖₛTₖ | | | | | |
| 570837 | ^{m}CₖₛTₖₛ^{m}Cₖₛ^{m}C_{ds}T_{ds}^{m}C_{ds}^{m}C_{ds}^{m}C_{ds}T_{ds}T_{ds}G_{ds}A_{ds} | 60.7 | 10579 | 10594 | 604 | 1070 |
| | ^{m}C_{ds}AₖₛTₖₛGₖ | | | | | |
| 570838 | ^{m}Cₖₛ^{m}CₖₛAₖₛG_{ds}A_{ds}^{m}C_{ds}^{m}C_{ds}^{m}C_{ds}^{m}C_{ds}C_{ds}A_{ds}T_{ds} | 42.9 | 10609 | 10624 | 605 | 1071 |
| | G_{ds}TₖₛTₖₛ^{m}Cₖ | | | | | |
| 570839 | GₖₛTₖₛ^{m}Cₖₛ^{m}C_{ds}A_{ds}G_{ds}A_{ds}^{m}C_{ds}^{m}C_{ds}^{m}C_{ds}^{m}C_{ds}^{m}C_{ds} | 64.3 | 10611 | 10626 | 606 | 1072 |
| | A_{ds}TₖₛGₖₛTₖ | | | | | |
| 570840 | GₖₛGₖₛGₖₛT_{ds}^{m}C_{ds}^{m}C_{ds}A_{ds}G_{ds}A_{ds}^{m}C_{ds}^{m}C_{ds}^{m}C_{ds} | 68.5 | 10613 | 10628 | 607 | 1073 |
| | ^{m}C_{ds}^{m}CₖₛAₖₛTₖ | | | | | |
| 570841 | Aₖₛ^{m}Cₖₛ^{m}CₖₛT_{ds}T_{ds}^{m}C_{ds}T_{ds}G_{ds}^{m}C_{ds}A_{ds}G_{ds}G_{ds}G_{ds} | 14.9 | 10631 | 10646 | 608 | 1074 |
| | Aₖₛ^{m}CₖₛTₖ | | | | | |
| 570842 | TₖₛAₖₛAₖₛA_{ds}^{m}C_{ds}^{m}C_{ds}T_{ds}T_{ds}^{mm}C_{ds}T_{ds}G_{ds}^{m}C_{ds}A_{ds} | 51.7 | 10634 | 10649 | 609 | 1075 |
| | GₖₛGₖₛGₖ | | | | | |
| 570843 | GₖₛAₖₛAₖₛA_{ds}A_{ds}G_{ds}^{m}C_{ds}^{m}C_{ds}^{m}C_{ds}T_{ds}G_{ds}^{m}C_{ds}^{m}C_{ds} | 46.3 | 10684 | 10699 | 610 | 1076 |
| | ^{m}Cₖₛ^{m}CₖₛTₖ | | | | | |
| 570844 | TₖₛAₖₛGₖₛG_{ds}A_{ds}A_{ds}A_{ds}A_{ds}G_{ds}^{m}C_{ds}^{m}C_{ds}^{m}C_{ds}T_{ds} | 52.3 | 10687 | 10702 | 611 | 1077 |
| | Gₖₛ^{m}Cₖₛ^{m}Cₖ | | | | | |
| 570845 | ^{m}CₖₛIₖₛTₖₛA_{ds}G_{ds}G_{ds}A_{ds}A_{ds}A_{ds}A_{ds}G_{ds}^{m}C_{ds}^{m}C_{ds} | 53.8 | 10689 | 10704 | 612 | 1078 |
| | ^{m}CₖₛTₖₛGₖ | | | | | |
| 570846 | TₖₛGₖₛ^{m}CₖₛT_{ds}T_{ds}A_{ds}G_{ds}G_{ds}A_{ds}A_{ds}A_{ds}A_{ds}G_{ds}^{m}Cₖₛ | 47.8 | 10691 | 10706 | 613 | 1079 |
| | ^{m}Cₖₛ^{m}Cₖ | | | | | |
| 570847 | Tₖₛ^{m}CₖₛTₖₛG_{ds}^{m}C_{ds}T_{ds}T_{ds}A_{ds}G_{ds}G_{ds}A_{ds}A_{ds}A_{ds}Aₖₛ | 43.9 | 10693 | 10708 | 614 | 1080 |
| | Gₖₛ^{m}Cₖ | | | | | |
| 570848 | ^{m}CₖₛTₖₛ^{m}Cₖₛ^{m}C_{ds}I_{ds}^{m}C_{ds}T_{ds}G_{ds}^{m}C_{ds}T_{ds}T_{ds}A_{ds}G_{ds} | 67.9 | 10697 | 10712 | 615 | 1081 |
| | GₖₛAₖₛAₖ | | | | | |
| 570849 | ^{m}Cₖₛ^{m}Cₖₛ^{m}CₖₛT_{ds}^{m}C_{ds}^{m}C_{ds}T_{ds}^{m}C_{ds}T_{ds}G_{ds}^{m}C_{ds}T_{ds} | 50.8 | 10699 | 10714 | 616 | 1082 |
| | T_{ds}AₖₛGₖₛGₖ | | | | | |
| 570850 | ^{m}CₖₛTₖₛGₖₛA_{ds}T_{ds}T_{ds}T_{ds}G_{ds}A_{ds}G_{ds}G_{ds}A_{ds}A_{ds}Gₖₛ | 41.1 | 10759 | 10774 | 617 | 1083 |
| | GₖₛGₖ | | | | | |
| 570851 | Tₖₛ^{m}Cₖₛ^{m}CₖₛT_{ds}G_{ds}A_{ds}T_{ds}T_{ds}T_{ds}G_{ds}A_{ds}G_{ds}G_{ds}Aₖₛ | 87.4 | 10761 | 10776 | 618 | 1084 |
| | AₖₛGₖ | | | | | |
| 570852 | ^{m}Cₖₛ^{m}CₖₛTₖₛ^{m}C_{ds}^{m}C_{ds}T_{ds}G_{ds}A_{ds}T_{ds}T_{ds}T_{ds}G_{ds}A_{ds} | 75.8 | 10763 | 10778 | 619 | 1085 |
| | GₖₛGₖₛAₖ | | | | | |
| 570853 | GₖₛAₖₛ^{m}Cₖₛ^{m}C_{ds}T_{ds}^{m}C_{ds}^{m}C_{ds}T_{ds}G_{ds}A_{ds}T_{ds}T_{ds}T_{ds} | 87.4 | 10765 | 10780 | 620 | 1086 |
| | GₖₛAₖₛGₖ | | | | | |
| 570854 | AₖₛAₖₛGₖₛA_{ds}^{m}C_{ds}^{m}C_{ds}T_{ds}^{m}C_{ds}^{m}C_{ds}T_{ds}G_{ds}A_{ds}T_{ds} | 60.3 | 10767 | 10782 | 621 | 1087 |
| | TₖₛTₖₛGₖ | | | | | |
| 570855 | ^{m}Cₖₛ^{m}CₖₛAₖₛA_{ds}G_{ds}A_{ds}^{m}C_{ds}^{m}C_{ds}T_{ds}^{m}C_{ds}^{m}C_{ds}T_{ds} | 61.4 | 10769 | 10784 | 622 | 1088 |
| | G_{ds}AₖₛTₖₛTₖ | | | | | |
| 570856 | ^{m}CₖₛTₖₛGₖₛ^{m}C_{ds}T_{ds}T_{ds}^{m}C_{ds}^{m}C_{ds}A_{ds}A_{ds}G_{ds}A_{ds}^{m}C_{ds} | 40.4 | 10775 | 10790 | 623 | 1089 |
| | ^{m}CₖₛTₖₛ^{m}Cₖ | | | | | |
| 570857 | AₖₛGₖₛ^{m}CₖₛT_{ds}G_{ds}^{m}C_{ds}T_{ds}T_{ds}^{m}C_{ds}^{m}C_{ds}A_{ds}A_{ds}G_{ds} | 48.5 | 10777 | 10792 | 624 | 1090 |
| | Aₖₛ^{m}Cₖₛ^{m}Cₖ | | | | | |
| 570858 | Gₖₛ^{m}CₖₛAₖₛG_{ds}^{mm}C_{ds}T_{ds}G_{ds}^{m}C_{ds}T_{ds}T_{ds}^{m}C_{ds}^{m}C_{ds} | 87.7 | 10779 | 10794 | 625 | 1091 |
| | A_{ds}AₖₛGₖₛAₖ | | | | | |
| 570859 | ^{m}CₖₛTₖₛGₖₛG_{ds}T_{ds}G_{ds}G_{ds}A_{ds}G_{ds}A_{ds}A_{ds}^{m}C_{ds}^{m}C_{ds} | 92.6 | 10816 | 10831 | 626 | 1092 |
| | AₖₛGₖₛAₖ | | | | | |
| 570860 | ^{m}CₖₛTₖₛ^{m}CₖₛT_{ds}G_{ds}G_{ds}T_{ds}G_{ds}G_{ds}A_{ds}G_{ds}A_{ds}A_{ds} | 86.6 | 10818 | 10833 | 627 | 1093 |
| | ^{m}CₖₛCₖₛAₖ | | | | | |
| 570861 | TₖₛTₖₛ^{m}CₖₛT_{ds}^{m}C_{ds}T_{ds}G_{ds}G_{ds}T_{ds}G_{ds}G_{ds}A_{ds}G_{ds}Aₖₛ | 82.6 | 10820 | 10835 | 628 | 1094 |
| | Aₖₛ^{m}Cₖ | | | | | |
| 570862 | GₖₛAₖₛTₖₛT_{ds}^{m}C_{ds}T_{ds}^{m}C_{ds}T_{ds}G_{ds}G_{ds}T_{ds}G_{ds}G_{ds}Aₖₛ | 76.1 | 10822 | 10837 | 629 | 1095 |
| | GₖₛAₖ | | | | | |
| 570863 | Aₖₛ^{m}CₖₛTₖₛT_{ds}A_{ds}^{m}C_{ds}T_{ds}G_{ds}T_{ds}T_{ds}T_{ds}^{m}C_{ds}A_{ds} | 80.6 | 10981 | 10996 | 630 | 1096 |
| | Tₖₛ^{m}Cₖₛ^{m}Cₖ | | | | | |
| 570864 | ^{m}CₖₛGₖₛGₖₛA_{ds}^{m}C_{ds}^{m}C_{ds}^{m}C_{ds}^{m}C_{ds}^{m}C_{ds}T_{ds}^{m}C_{ds}^{m}C | 58.7 | 11002 | 11017 | 631 | 1097 |
| | ^{m}C_{ds}^{m}CₖₛTₖₛ^{m}Cₖ | | | | | |
| 570865 | GₖₛAₖₛ^{m}CₖₛG_{ds}G_{ds}A_{ds}^{m}C_{ds}^{m}C_{ds}^{m}C_{ds}^{m}C_{ds}^{m}C_{ds}T_{ds} | 61.5 | 11004 | 11019 | 632 | 1098 |
| | ^{m}C_{ds}^{m}Cₖₛ^{m}Cₖₛ^{m}Cₖ | | | | | |
| 570866 | ^{m}CₖₛTₖₛGₖₛA_{ds}^{m}C_{ds}G_{ds}G_{ds}A_{ds}^{m}C_{ds}^{m}C_{ds}^{m}C_{ds}^{m}C_{ds} | 47.6 | 11006 | 11021 | 633 | 1099 |
| | ^{m}C_{ds}Tₖₛ^{m}Cₖₛ^{m}Cₖ | | | | | |
| 570867 | ^{m}Cₖₛ^{m}Cₖₛ^{m}CₖₛT_{ds}G_{ds}A_{ds}^{m}C_{ds}G_{ds}G_{ds}A_{ds}^{m}C_{ds}^{m}C_{ds} | 69.5 | 11008 | 11023 | 634 | 1100 |
| | ^{m}C_{ds}^{m}Cₖₛ^{m}CₖₛTₖ | | | | | |
| 570868 | AₖₛAₖₛGₖₛ^{m}C_{ds}^{m}C_{ds}^{m}C_{ds}T_{ds}^{m}C_{ds}A_{ds}^{m}C_{ds}^{m}C_{ds}T_{ds} | 54 | 11036 | 11051 | 635 | 1101 |
| | T_{ds}TₖₛTₖₛ^{m}Cₖ | | | | | |
| 570869 | GₖₛGₖₛAₖₛA_{ds}G_{ds}^{m}C_{ds}^{m}C_{ds}^{m}C_{ds}T_{ds}^{m}C_{ds}A_{ds}^{m}C_{ds} | 37.5 | 11038 | 11053 | 636 | 1102 |
| | ^{m}C_{ds}TₖₛTₖₛTₖ | | | | | |
| 570870 | ^{m}CₖₛGₖₛGₖₛG_{ds}A_{ds}A_{ds}G_{ds}^{m}C_{ds}^{m}C_{ds}^{m}C_{ds}T_{ds}^{m}C_{ds}A_{ds} | 70.7 | 11040 | 11055 | 637 | 1103 |
| | ^{m}Cₖₛ^{m}CₖₛTₖ | | | | | |
| 570871 | ^{m}Cₖₛ^{m}Cₖₛ^{m}CₖₛG_{ds}G_{ds}G_{ds}A_{ds}A_{ds}G_{ds}^{m}C_{ds}^{m}C_{ds}^{m}C_{ds} | 71.2 | 11042 | 11057 | 638 | 1104 |
| | T_{ds}^{m}CₖₛAₖₛ^{m}Cₖ | | | | | |
| 570872 | ^{m}CₖₛAₖₛ^{m}Cₖₛ^{m}C_{ds}^{m}C_{ds}G_{ds}G_{ds}G_{ds}A_{ds}A_{ds}G_{ds}^{m}C_{ds} | 51.6 | 11044 | 11059 | 639 | 1105 |
| | ^{m}C_{ds}^{m}CₖₛTₖₛ^{m}Cₖ | | | | | |
| 570873 | Gₖₛ^{m}Cₖₛ^{m}CₖₛA_{ds}^{m}C_{ds}^{m}C_{ds}C_{ds}G_{ds}G_{ds}G_{ds}A_{ds}A_{ds}G_{ds} | 45.8 | 11046 | 11061 | 640 | 1106 |
| | ^{m}Cₖₛ^{m}Cₖₛ^{m}Cₖ | | | | | |
| 570874 | Aₖₛ^{m}CₖₛGₖₛ^{m}C_{ds}^{m}C_{ds}A_{ds}^{m}C_{ds}^{m}C_{ds}^{m}C_{ds}G_{ds}G_{ds}G_{ds} | 31.8 | 11048 | 11063 | 641 | 1107 |
| | A_{ds}AₖₛGₖₛ^{m}Cₖ | | | | | |
| 570875 | ^{m}CₖₛTₖₛGₖₛT_{ds}T_{ds}^{m}C_{ds}A_{ds}G_{ds}G_{ds}A_{ds}A_{ds}G_{ds}T_{ds} | 14.3 | 11082 | 11097 | 642 | 1108 |
| | ^{m}Cₖₛ^{m}Cₖₛ^{m}Cₖ | | | | | |
| 570876 | TₖₛTₖₛ^{m}CₖₛT_{ds}G_{ds}T_{ds}T_{ds}^{m}C_{ds}A_{ds}G_{ds}G_{ds}A_{ds}A_{ds}Gₖₛ | 18 | 11084 | 11099 | 643 | 1109 |
| | Tₖₛ^{m}Cₖ | | | | | |
| 570877 | Gₖₛ^{m}CₖₛTₖₛT_{ds}^{m}C_{ds}T_{ds}G_{ds}T_{ds}T_{ds}^{m}C_{ds}A_{ds}G_{ds}G_{ds} | 44 | 11086 | 11101 | 644 | 1110 |
| | AₖₛAₖₛGₖ | | | | | |

TABLE 15
Inhibition of human DMPK RNA transcript in HepG2 cells targeting SEQ ID NO: 2

| | | | Start | Stop | | |
|---|---|---|---|---|---|---|
| | | | Site on | Site on | | Modified |
| ISIS | | % Target | Seq | Seq ID: | Unmodified | Seq ID |
| No. | Sequence | Expression | ID: 2 | 2 | Seq ID No. | No. |
| UTC | N/A | 100 | N/A | N/A | | |
| 445569 | ^{m}CₑₛGₑₛGₑₛAₑₛGₑₛ^{m}C_{ds}G_{ds}G_{ds}T_{ds}T_{ds}G_{ds}T_{ds}G_{ds} | 55 | 13226 | 13245 | 24 | 1443 |
| | A_{ds}A_{ds}^{m}CₑₛTₑₛGₑₛGₑₛ^{m}Cₑ | | | | | |
| 486178 | Aₖₛ^{m}CₖₛAₖₛA_{ds}T_{ds}A_{ds}A_{ds}A_{ds}T_{ds}A_{ds}^{m}C_{ds}^{m}C_{ds} | 33.9 | 13836 | 13851 | 23 | 881 |
| | G_{ds}AₖₛGₖₛGₖ | | | | | |
| 570647 | Gₖₛ^{m}CₖₛTₖₛT_{ds}G_{ds}G_{ds}G_{ds}^{m}C_{ds}^{m}C_{ds}^{m}C_{ds}A_{ds}^{m}C_{ds} | 80.3 | 5718 | 5733 | 645 | 1111 |
| | ^{m}C_{ds}^{m}Cₖₛ^{m}CₖₛTₖ | | | | | |
| 570648 | AₖₛGₖₛGₖₛ^{m}C_{ds}T_{ds}T_{ds}G_{ds}G_{ds}G_{ds}^{m}C_{ds}^{m}C_{ds}^{m}C_{ds} | 92.3 | 5720 | 5735 | 646 | 1112 |
| | A_{ds}^{m}Cₖₛ^{m}Cₖₛ^{m}Cₖ | | | | | |
| 570649 | ^{m}CₖₛGₖₛAₖₛG_{ds}G_{ds}^{m}C_{ds}T_{ds}T_{ds}G_{ds}G_{ds}G_{ds}^{m}C_{ds}^{m} | 100.7 | 5722 | 5737 | 647 | 1113 |
| | C_{ds}^{m}CₖₛAₖₛ^{m}Cₖ | | | | | |
| 570650 | AₖₛGₖₛ^{m}CₖₛG_{ds}A_{ds}G_{ds}G_{ds}^{m}C_{ds}T_{ds}T_{ds}G_{ds}G_{ds}G_{ds} | 75.8 | 5724 | 5739 | 648 | 1114 |
| | ^{m}Cₖₛ^{m}Cₖₛ^{m}Cₖ | | | | | |
| 570651 | AₖₛGₖₛAₖₛG_{ds}^{m}C_{ds}G_{ds}A_{ds}G_{ds}G_{ds}^{m}C_{ds}T_{ds}T_{ds}G_{ds} | 99.8 | 5726 | 5741 | 649 | 1115 |
| | GₖₛGₖₛ^{m}Cₖ | | | | | |
| 570652 | Gₖₛ^{m}CₖₛAₖₛG_{ds}A_{ds}G_{ds}^{m}C_{ds}G_{ds}A_{ds}G_{ds}G_{ds}^{m}C_{ds} | 135.4 | 5728 | 5743 | 650 | 1116 |
| | T_{ds}TₖₛGₖₛGₖ | | | | | |
| 570653 | GₖₛAₖₛGₖₛ^{m}C_{ds}A_{ds}G_{ds}A_{ds}G_{ds}^{m}C_{ds}G_{ds}A_{ds}G_{ds} | 111.5 | 5730 | 5745 | 651 | 1117 |
| | G_{ds}^{m}CₖₛTₖₛTₖ | | | | | |
| 570654 | AₖₛAₖₛAₖₛG_{ds}G_{ds}A_{ds}G_{ds}^{m}C_{ds}A_{ds}G_{ds}A_{ds}G_{ds}^{m} | 87.5 | 5734 | 5749 | 652 | 1118 |
| | C_{ds}GₖₛAₖₛGₖ | | | | | |
| 570655 | ^{m}CₖₛAₖₛAₖₛA_{ds}A_{ds}G_{ds}G_{ds}A_{ds}G_{ds}^{m}C_{ds}A_{ds}G_{ds} | 94.5 | 5736 | 5751 | 653 | 1119 |
| | A_{ds}Gₖₛ^{m}CₖₛGₖ | | | | | |
| 570656 | TₖₛGₖₛGₖₛA_{ds}^{m}C_{ds}^{m}C_{ds}A_{ds}A_{ds}A_{ds}A_{ds}G_{ds}G_{ds}A_{ds} | 75.4 | 5741 | 5756 | 654 | 1120 |
| | Gₖₛ^{m}CₖₛAₖ | | | | | |
| 570657 | ^{m}Cₖₛ^{m}CₖₛTₖₛG_{ds}G_{ds}A_{ds}^{m}C_{ds}^{m}C_{ds}A_{ds}A_{ds}A_{ds}A_{ds} | 87.3 | 5743 | 5758 | 655 | 1121 |
| | G_{ds}GₖₛAₖₛGₖ | | | | | |
| 570658 | ^{m}CₖₛAₖₛ^{m}Cₖₛ^{m}C_{ds}T_{ds}G_{ds}G_{ds}A_{ds}^{m}C_{ds}^{m}C_{ds}A_{ds}A_{ds} | 93.2 | 5745 | 5760 | 656 | 1122 |
| | A_{ds}AₖₛGₖₛGₖ | | | | | |
| 570659 | ^{m}CₖₛGₖₛ^{m}CₖₛA_{ds}^{m}C_{ds}^{m}C_{ds}T_{ds}G_{ds}G_{ds}A_{ds}^{m}C_{ds}^{m} | 70 | 5747 | 5762 | 657 | 1123 |
| | C_{ds}A_{ds}AₖₛAₖₛAₖ | | | | | |
| 570660 | GₖₛAₖₛ^{m}Cₖₛ^{m}C_{ds}G_{ds}^{m}C_{ds}A_{ds}^{m}C_{ds}^{m}C_{ds}T_{ds}G_{ds}G_{ds} | 46.4 | 5750 | 5765 | 658 | 1124 |
| | A_{ds}^{m}Cₖₛ^{m}CₖₛAₖ | | | | | |
| 570661 | Aₖₛ^{m}Cₖₛ^{m}CₖₛT_{ds}T_{ds}G_{ds}T_{ds}A_{ds}G_{ds}T_{ds}G_{ds}G_{ds}A_{ds} | 44 | 5951 | 5966 | 659 | 1125 |
| | ^{m}CₖₛGₖₛAₖ | | | | | |
| 570662 | Tₖₛ^{m}CₖₛAₖₛ^{m}C_{ds}^{m}C_{ds}T_{ds}T_{ds}G_{ds}T_{ds}A_{ds}G_{ds}T_{ds}G_{ds} | 76.8 | 5953 | 5968 | 660 | 1126 |
| | GₖₛAₖₛ^{m}Cₖ | | | | | |
| 570663 | Gₖₛ^{m}CₖₛTₖₛ^{m}C_{ds}A_{ds}^{m}C_{ds}^{m}C_{ds}T_{ds}T_{ds}G_{ds}T_{ds}A_{ds} | 69.5 | 5955 | 5970 | 661 | 1127 |
| | G_{ds}TₖₛGₖₛGₖ | | | | | |
| 570664 | GₖₛGₖₛAₖₛG_{ds}A_{ds}G_{ds}G_{ds}A_{ds}G_{ds}G_{ds}^{m}C_{ds}G_{ds}A_{ds} | 88.2 | 6015 | 6030 | 662 | 1111 |
| | TₖₛAₖₛGₖ | | | | | |
| 570665 | AₖₛGₖₛGₖₛG_{ds}A_{ds}G_{ds}A_{ds}G_{ds}G_{ds}A_{ds}G_{ds}G_{ds}^{m}C_{ds} | 96.9 | 6017 | 6032 | 663 | 1112 |
| | GₖₛAₖₛTₖ | | | | | |
| 570666 | ^{m}CₖₛTₖₛ^{m}Cₖₛ^{m}C_{ds}T_{ds}G_{ds}^{m}C_{ds}T_{ds}^{m}C_{ds}A_{ds}G_{ds}A_{ds} | 74.7 | 6028 | 6043 | 664 | 1113 |
| | G_{ds}GₖₛGₖₛAₖ | | | | | |
| 570667 | GₖₛTₖₛGₖₛ^{m}C_{ds}T_{ds}^{m}C_{ds}^{m}C_{ds}T_{ds}G_{ds}^{m}C_{ds}T_{ds}^{m}C_{ds} | 77.5 | 6031 | 6046 | 665 | 1114 |
| | A_{ds}GₖₛAₖₛGₖ | | | | | |
| 570668 | AₖₛGₖₛGₖₛT_{ds}G_{ds}^{m}C_{ds}T_{ds}^{m}C_{ds}^{m}C_{ds}T_{ds}G_{ds}^{m}C_{ds} | 76.7 | 6033 | 6048 | 666 | 1115 |
| | T_{ds}^{m}CₖₛAₖₛGₖ | | | | | |
| 570669 | AₖₛGₖₛAₖₛG_{ds}G_{ds}T_{ds}G_{ds}^{m}C_{ds}T_{ds}^{m}C_{ds}^{m}C_{ds}T_{ds} | 43.3 | 6035 | 6050 | 667 | 1116 |
| | G_{ds}^{m}CₖₛTₖₛ^{m}Cₖ | | | | | |
| 570670 | AₖₛGₖₛAₖₛG_{ds}A_{ds}G_{ds}G_{ds}T_{ds}G_{ds}^{m}C_{ds}T_{ds}^{m}C_{ds}^{m} | 27.1 | 6037 | 6052 | 668 | 1117 |
| | C_{ds}TₖₛGₖₛ^{m}Cₖ | | | | | |
| 570671 | Aₖₛ^{m}Cₖₛ^{m}Cₖₛ^{m}C_{ds}^{m}C_{ds}G_{ds}^{m}C_{ds}^{m}C_{ds}^{m}C_{ds}^{m}C_{ds}^{m} | 42.6 | 6291 | 6306 | 669 | 1118 |
| | C_{ds}G_{ds}^{m}C_{ds}Tₖₛ^{m}CₖₛAₖ | | | | | |
| 570672 | ^{m}CₖₛTₖₛAₖₛ^{m}C_{ds}^{m}C_{ds}^{m}C_{ds}^{m}C_{ds}G_{ds}^{m}C_{ds}^{m}C_{ds}^{m} | 44.9 | 6293 | 6308 | 670 | 1119 |
| | C_{ds}^{m}C_{ds}^{m}C_{ds}Gₖₛ^{m}CₖₛTₖ | | | | | |
| 570673 | Aₖₛ^{m}Cₖₛ^{m}CₖₛT_{ds}A_{ds}^{m}C_{ds}^{m}C_{ds}^{m}C_{ds}^{m}C_{ds}G_{ds}^{m}C_{ds} | 36.6 | 6295 | 6310 | 671 | 1120 |
| | ^{m}C_{ds}^{m}C_{ds}^{m}Cₖₛ^{m}CₖₛGₖ | | | | | |
| 570674 | GₖₛTₖₛAₖₛ^{m}C_{ds}^{m}C_{ds}T_{ds}A_{ds}^{m}C_{ds}^{m}C_{ds}^{m}C_{ds}^{m}C_{ds} | 52 | 6297 | 6312 | 672 | 1121 |
| | G_{ds}^{m}C_{ds}^{m}Cₖₛ^{m}Cₖₛ^{m}Cₖ | | | | | |
| 570675 | AₖₛGₖₛGₖₛT_{ds}A_{ds}^{m}C_{ds}^{m}C_{ds}T_{ds}A_{ds}^{m}C_{ds}^{m}C_{ds}^{m}C_{ds} | 56.4 | 6299 | 6314 | 673 | 1122 |
| | ^{m}C_{ds}Gₖₛ^{m}Cₖₛ^{m}Cₖ | | | | | |
| 570676 | GₖₛGₖₛGₖₛA_{ds}G_{ds}G_{ds}T_{ds}T_{ds}^{m}C_{ds}^{m}C_{ds}^{m}C_{ds}G_{ds}^{m} | 51.4 | 6329 | 6344 | 674 | 1123 |
| | C_{ds}AₖₛGₖₛ^{m}Cₖ | | | | | |
| 570677 | GₖₛTₖₛ^{m}Cₖₛ^{m}C_{ds}T_{ds}T_{ds}A_{ds}^{m}C_{ds}T_{ds}^{m}C_{ds}^{m}C_{ds}A_{ds} | 28 | 6360 | 6375 | 675 | 1124 |
| | A_{ds}^{m}CₖₛTₖₛTₖ | | | | | |
| 570678 | ^{m}CₖₛTₖₛGₖₛT_{ds}^{m}C_{ds}^{m}C_{ds}T_{ds}T_{ds}A_{ds}^{m}C_{ds}T_{ds}^{m}C_{ds} | 33.6 | 6362 | 6377 | 676 | 1125 |
| | C_{ds}AₖₛAₖₛ^{m}Cₖ | | | | | |
| 570679 | ^{m}CₖₛAₖₛ^{m}CₖₛT_{ds}G_{ds}T_{ds}^{m}C_{ds}^{m}C_{ds}T_{ds}T_{ds}A_{ds}^{m}C_{ds} | 7.9 | 6364 | 6379 | 677 | 1126 |
| | T_{ds}^{m}Cₖₛ^{m}CₖₛAₖ | | | | | |
| 570680 | GₖₛGₖₛ^{m}CₖₛA_{ds}^{m}C_{ds}T_{ds}G_{ds}T_{ds}^{m}C_{ds}^{m}C_{ds}T_{ds}T_{ds} | 20.2 | 6366 | 6381 | 678 | 1127 |
| | A_{ds}^{m}CₖₛTₖₛ^{m}Cₖ | | | | | |
| 570681 | TₖₛAₖₛGₖₛG_{ds}^{m}C_{ds}A_{ds}^{m}C_{ds}T_{ds}G_{ds}T_{ds}^{m}C_{ds}^{m}C_{ds} | 38.3 | 6368 | 6383 | 679 | 1145 |
| | T_{ds}TₖₛAₖₛ^{m}Cₖ | | | | | |
| 570682 | GₖₛGₖₛTₖₛA_{ds}G_{ds}G_{ds}^{m}C_{ds}A_{ds}^{m}C_{ds}T_{ds}G_{ds}T_{ds}^{m} | 13.9 | 6370 | 6385 | 680 | 1146 |
| | C_{ds}^{m}CₖₛTₖₛTₖ | | | | | |
| 570683 | GₖₛTₖₛ^{m}CₖₛA_{ds}^{m}C_{ds}T_{ds}G_{ds}^{m}C_{ds}T_{ds}G_{ds}G_{ds}G_{ds}T_{ds} | 29 | 6445 | 6460 | 681 | 1147 |
| | ^{m}Cₖₛ^{m}CₖₛTₖ | | | | | |
| 570684 | GₖₛGₖₛTₖₛ^{m}C_{ds}A_{ds}^{m}C_{ds}T_{ds}G_{ds}^{m}C_{ds}T_{ds}G_{ds}G_{ds} | 21.3 | 6446 | 6461 | 43 | 1148 |
| | G_{ds}Tₖₛ^{m}Cₖₛ^{m}Cₖ | | | | | |
| 570685 | AₖₛGₖₛGₖₛT_{ds}^{m}C_{ds}A_{ds}^{m}C_{ds}T_{ds}G_{ds}^{m}C_{ds}T_{ds}G_{ds} | 16.9 | 6447 | 6462 | 682 | 1149 |
| | G_{ds}GₖₛTₖₛ^{m}Cₖ | | | | | |
| 570686 | ^{m}CₖₛTₖₛAₖₛG_{ds}G_{ds}T_{ds}^{m}C_{ds}A_{ds}^{m}C_{ds}T_{ds}G_{ds}^{m}C_{ds} | 19.6 | 6449 | 6464 | 683 | 1150 |
| | T_{ds}GₖₛGₖₛGₖ | | | | | |
| 570687 | GₖₛTₖₛ^{m}CₖₛT_{ds}A_{ds}G_{ds}G_{ds}T_{ds}^{m}C_{ds}A_{ds}^{m}C_{ds}T_{ds} | 15.7 | 6451 | 6466 | 684 | 1151 |
| | G_{ds}^{m}CₖₛTₖₛGₖ | | | | | |
| 570688 | AₖₛAₖₛGₖₛT_{ds}^{m}C_{ds}T_{ds}A_{ds}G_{ds}G_{ds}T_{ds}^{m}C_{ds}A_{ds}^{m} | 16.6 | 6453 | 6468 | 685 | 1152 |
| | C_{ds}TₖₛGₖₛ^{m}Cₖ | | | | | |
| 570689 | Gₖₛ^{m}CₖₛAₖₛ^{m}C_{ds}T_{ds}^{m}C_{ds}^{m}C_{ds}A_{ds}T_{ds}T_{ds}G_{ds}T_{ds}^{m} | 13.2 | 6530 | 6545 | 686 | 1153 |
| | C_{ds}Tₖₛ^{m}CₖₛAₖ | | | | | |
| 570690 | ^{m}CₖₛTₖₛGₖₛ^{m}C_{ds}A_{ds}^{m}C_{ds}T_{ds}^{m}C_{ds}^{m}C_{ds}A_{ds}T_{ds}T_{ds} | 50.1 | 6532 | 6547 | 687 | 1154 |
| | G_{ds}Tₖₛ^{m}CₖₛTₖ | | | | | |
| 570691 | ^{m}Cₖₛ^{m}Cₖₛ^{m}CₖₛT_{ds}G_{ds}^{m}C_{ds}A_{ds}^{m}C_{ds}T_{ds}^{m}C_{ds}^{m}C_{ds} | 48.4 | 6534 | 6549 | 688 | 1155 |
| | A_{ds}T_{ds}TₖₛGₖₛTₖ | | | | | |
| 570692 | ^{m}Cₖₛ^{m}Cₖₛ^{m}Cₖₛ^{m}C_{ds}^{m}C_{ds}T_{ds}G_{ds}^{m}C_{ds}A_{ds}^{m}C_{ds}T_{ds} | 74 | 6536 | 6551 | 689 | 1156 |
| | ^{m}C_{ds}^{m}C_{ds}AₖₛTₖₛTₖ | | | | | |
| 570693 | ^{m}CₖₛTₖₛTₖₛG_{ds}^{m}C_{ds}T_{ds}G_{ds}A_{ds}G_{ds}T_{ds}^{m}C_{ds}A_{ds} | 25.3 | 6559 | 6574 | 690 | 1157 |
| | G_{ds}GₖₛAₖₛGₖ | | | | | |
| 570694 | Tₖₛ^{m}Cₖₛ^{m}CₖₛT_{ds}T_{ds}G_{ds}^{m}C_{ds}T_{ds}G_{ds}A_{ds}G_{ds}T_{ds}^{m} | 39.5 | 6561 | 6576 | 691 | 1158 |
| | C_{ds}AₖₛGₖₛGₖ | | | | | |
| 570695 | ^{m}CₖₛTₖₛTₖₛ^{m}C_{ds}^{m}C_{ds}T_{ds}T_{ds}G_{ds}^{m}C_{ds}T_{ds}G_{ds}A_{ds} | 22.9 | 6563 | 6578 | 692 | 1159 |
| | G_{ds}Tₖₛ^{m}CₖₛAₖ | | | | | |
| 570696 | Aₖₛ^{m}Cₖₛ^{m}CₖₛT_{ds}T_{ds}^{m}C_{ds}^{m}C_{ds}T_{ds}T_{ds}G_{ds}^{m}C_{ds}T_{ds} | 52.5 | 6565 | 6580 | 693 | 1160 |
| | G_{ds}AₖₛGₖₛTₖ | | | | | |
| 570697 | GₖₛGₖₛAₖₛ^{m}C_{ds}^{m}C_{ds}T_{ds}T_{ds}^{m}C_{ds}^{m}C_{ds}T_{ds}T_{ds}G_{ds}^{m} | 37.6 | 6567 | 6582 | 694 | 1161 |
| | C_{ds}TₖₛGₖₛAₖ | | | | | |
| 570698 | ^{m}CₖₛAₖₛGₖₛG_{ds}A_{ds}^{m}C_{ds}^{m}C_{ds}T_{ds}T_{ds}^{m}C_{ds}^{m}C_{ds}T_{ds} | 44.2 | 6569 | 6584 | 695 | 1162 |
| | T_{ds}Gₖₛ^{m}CₖₛTₖ | | | | | |
| 570699 | AₖₛGₖₛ^{m}Cₖₛ^{m}C_{ds}^{m}C_{ds}T_{ds}^{m}C_{ds}^{m}C_{ds}A_{ds}G_{ds}G_{ds}A_{ds} | 26.6 | 6576 | 6591 | 696 | 1163 |
| | ^{m}C_{ds}^{m}CₖₛTₖₛTₖ | | | | | |
| 570700 | TₖₛAₖₛGₖₛ^{m}C_{ds}T_{ds}^{m}C_{ds}^{m}C_{ds}^{m}C_{ds}^{m}C_{ds}A_{ds}^{m}C_{ds} | 33.6 | 6594 | 6609 | 697 | 1164 |
| | T_{ds}^{m}C_{ds}^{m}CₖₛAₖₛGₖ | | | | | |
| 570701 | GₖₛAₖₛTₖₛA_{ds}G_{ds}^{m}C_{ds}T_{ds}^{m}C_{ds}^{m}C_{ds}^{m}C_{ds}^{m}C_{ds}A_{ds} | 20.4 | 6596 | 6611 | 698 | 1165 |
| | ^{m}C_{ds}Tₖₛ^{m}Cₖₛ^{m}Cₖ | | | | | |
| 570702 | ^{m}CₖₛAₖₛGₖₛA_{ds}T_{ds}A_{ds}G_{ds}^{m}C_{ds}T_{ds}^{m}C_{ds}^{m}C_{ds}^{m}C_{ds} | 33.8 | 6598 | 6613 | 699 | 1166 |
| | ^{m}C_{ds}Aₖₛ^{m}CₖₛTₖ | | | | | |
| 570703 | ^{m}CₖₛTₖₛ^{m}CₖₛA_{ds}G_{ds}A_{ds}T_{ds}A_{ds}G_{ds}^{m}C_{ds}T_{ds}^{m}C_{ds} | 25.8 | 6600 | 6615 | 700 | 1167 |
| | ^{m}C_{ds}^{m}Cₖₛ^{m}CₖₛAₖ | | | | | |
| 570704 | AₖₛGₖₛ^{m}CₖₛT_{ds}^{m}C_{ds}A_{ds}G_{ds}A_{ds}T_{ds}A_{ds}G_{ds}^{m}C_{ds} | 29.1 | 6602 | 6617 | 701 | 1168 |
| | T_{ds}^{m}Cₖₛ^{m}Cₖₛ^{m}Cₖ | | | | | |
| 570705 | Tₖₛ^{m}CₖₛAₖₛG_{ds}^{m}C_{ds}T_{ds}^{m}C_{ds}A_{ds}G_{ds}A_{ds}T_{ds}A_{ds} | 47.4 | 6604 | 6619 | 702 | 1169 |
| | G_{ds}^{m}CₖₛTₖₛ^{m}Cₖ | | | | | |
| 570706 | Tₖₛ^{m}CₖₛTₖₛ^{m}C_{ds}A_{ds}G_{ds}^{m}C_{ds}T_{ds}^{m}C_{ds}A_{ds}G_{ds}A_{ds} | 33.4 | 6606 | 6621 | 703 | 1170 |
| | T_{ds}AₖₛGₖₛ^{m}Cₖ | | | | | |
| 570707 | GₖₛAₖₛGₖₛT_{ds}^{m}C_{ds}^{m}C_{ds}T_{ds}^{m}C_{ds}T_{ds}^{m}C_{ds}^{m}C_{ds}T_{ds} | 49 | 6636 | 6651 | 704 | 1171 |
| | G_{ds}^{m}CₖₛTₖₛTₖ | | | | | |
| 570708 | GₖₛGₖₛAₖₛG_{ds}G_{ds}A_{ds}G_{ds}T_{ds}^{m}C_{ds}^{m}C_{ds}T_{ds}^{m}C_{ds} | 79.2 | 6640 | 6655 | 705 | 1172 |
| | T_{ds}^{m}Cₖₛ^{m}CₖₛTₖ | | | | | |
| 570709 | GₖₛAₖₛGₖₛG_{ds}A_{ds}G_{ds}G_{ds}A_{ds}G_{ds}T_{ds}^{m}C_{ds}^{m}C_{ds}T_{ds} | 63.3 | 6642 | 6657 | 706 | 1173 |
| | ^{m}CₖₛTₖₛ^{m}Cₖ | | | | | |
| 570710 | ^{m}CₖₛAₖₛAₖₛA_{ds}A_{ds}G_{ds}G_{ds}G_{ds}^{m}C_{ds}A_{ds}^{m}C_{ds}^{m}C_{ds} | 38.8 | 6713 | 6728 | 707 | 1174 |
| | ^{m}C_{ds}AₖₛGₖₛAₖ | | | | | |
| 570711 | AₖₛGₖₛ^{m}CₖₛA_{ds}A_{ds}A_{ds}A_{ds}G_{ds}G_{ds}G_{ds}^{m}C_{ds}A_{ds}^{m} | 13.7 | 6715 | 6730 | 708 | 1175 |
| | C_{ds}^{m}Cₖₛ^{m}CₖₛAₖ | | | | | |
| 570712 | GₖₛGₖₛAₖₛT_{ds}^{m}C_{ds}^{m}C_{ds}^{m}C_{ds}^{m}C_{ds}A_{ds}G_{ds}T_{ds}A_{ds} | 45.8 | 6733 | 6748 | 709 | 1176 |
| | T_{ds}TₖₛGₖₛTₖ | | | | | |
| 570713 | ^{m}CₖₛTₖₛGₖₛG_{ds}A_{ds}T_{ds}^{m}C_{ds}^{m}C_{ds}^{m}C_{ds}^{m}C_{ds}A_{ds}G_{ds} | 45.6 | 6735 | 6750 | 710 | 1177 |
| | T_{ds}AₖₛTₖₛTₖ | | | | | |
| 570714 | TₖₛGₖₛ^{m}CₖₛT_{ds}G_{ds}G_{ds}A_{ds}T_{ds}^{m}C_{ds}^{m}C_{ds}^{m}C_{ds}^{m}C_{ds} | 43.6 | 6737 | 6752 | 711 | 1178 |
| | A_{ds}GₖₛTₖₛAₖ | | | | | |
| 570715 | AₖₛTₖₛTₖₛ^{m}C_{ds}T_{ds}^{m}C_{ds}T_{ds}A_{ds}G_{ds}A_{ds}^{m}C_{ds}T_{ds}G_{ds} | 18.3 | 6789 | 6804 | 712 | 1179 |
| | ^{m}CₖₛAₖₛAₖ | | | | | |
| 570716 | TₖₛAₖₛAₖₛT_{ds}T_{ds}^{m}C_{ds}T_{ds}^{m}C_{ds}T_{ds}A_{ds}G_{ds}A_{ds}^{m}C_{ds} | 15.1 | 6791 | 6806 | 713 | 1180 |
| | TₖₛGₖₛ^{m}Cₖ | | | | | |
| 570717 | Tₖₛ^{m}CₖₛTₖₛA_{ds}A_{ds}T_{ds}T_{ds}^{m}C_{ds}T_{ds}^{m}C_{ds}T_{ds}A_{ds}G_{ds} | 49.9 | 6793 | 6808 | 714 | 1181 |
| | Aₖₛ^{m}CₖₛTₖ | | | | | |
| 570718 | Tₖₛ^{m}CₖₛTₖₛ^{m}C_{ds}T_{ds}A_{ds}A_{ds}T_{ds}T_{ds}^{m}C_{ds}T_{ds}^{m}C_{ds} | 77.6 | 6795 | 6810 | 715 | 1182 |
| | T_{ds}AₖₛGₖₛAₖ | | | | | |
| 570719 | ^{m}CₖₛTₖₛ^{m}Cₖₛ^{m}C_{ds}A_{ds}T_{ds}A_{ds}A_{ds}T_{ds}T_{ds}^{m}C_{ds}T_{ds}^{m} | 42 | 6804 | 6819 | 716 | 1183 |
| | C_{ds}TₖₛAₖₛAₖ | | | | | |
| 570720 | Aₖₛ^{m}CₖₛTₖₛ^{m}C_{ds}T_{ds}^{m}C_{ds}^{m}C_{ds}A_{ds}T_{ds}A_{ds}A_{ds}T_{ds} | 28.5 | 6807 | 6822 | 717 | 1184 |
| | T_{ds}^{m}CₖₛTₖₛ^{m}Cₖ | | | | | |
| 570721 | Aₖₛ^{m}CₖₛAₖₛ^{m}C_{ds}T_{ds}^{m}C_{ds}T_{ds}^{m}C_{ds}^{m}C_{ds}A_{ds}T_{ds}A_{ds} | 27.4 | 6809 | 6824 | 718 | 1185 |
| | A_{ds}TₖₛTₖₛ^{m}Cₖ | | | | | |
| 570722 | ^{m}Cₖₛ^{m}CₖₛAₖₛ^{m}C_{ds}A_{ds}^{m}C_{ds}T_{ds}^{m}C_{ds}T_{ds}^{m}C_{ds}^{m}C_{ds} | 35.4 | 6811 | 6826 | 719 | 1186 |
| | A_{ds}T_{ds}AₖₛAₖₛTₖ | | | | | |
| 570723 | TₖₛGₖₛ^{m}Cₖₛ^{m}C_{ds}A_{ds}^{m}C_{ds}A_{ds}^{m}C_{ds}T_{ds}^{m}C_{ds}T_{ds}^{m} | 45 | 6813 | 6828 | 720 | 1187 |
| | C_{ds}^{m}C_{ds}AₖₛTₖₛAk | | | | | |

TABLE 16
Inhibition of human DMPK RNA transcript in HepG2 cells targeting SEQ ID NO: 2

| | | | Start | Stop | | |
|---|---|---|---|---|---|---|
| | | | Site on | Site on | | Modified |
| ISIS | | % Target | Seq | Seq | Unmodified | Seq ID |
| No. | Sequence | Expression | ID: 2 | ID: 2 | Seq ID No. | No. |
| UTC | N/A | 100 | N/A | N/A | | |
| 445569 | ^{m}CₑₛGₑₛGₑₛAₑₛGₑₛ^{m}C_{ds}G_{ds}G_{ds}T_{ds}T_{ds}G_{ds}T_{ds} | 33.9 | 13226 | 13245 | 24 | 1443 |
| | G_{ds}A_{ds}A_{ds}^{m}CₑₛTₑₛGₑₛGₑₛ^{m}Cₑ | | | | | |
| 486178 | Aₖₛ^{m}CₖₛAₖₛA_{ds}T_{ds}A_{ds}A_{ds}A_{ds}T_{ds}A_{ds}^{m}C_{ds}^{m}C_{ds} | 21.5 | 13836 | 13851 | 23 | 881 |
| | G_{ds}AₖₛGₖₛGₖ | | | | | |
| 570339 | ^{m}Cₖₛ^{m}Cₖₛ^{m}CₖₛA_{ds}T_{ds}G_{ds}^{m}C_{ds}^{m}C_{ds}^{m}C_{ds}A_{ds}T_{ds} | 56.2 | 1534 | 1549 | 721 | 1188 |
| | ^{m}C_{ds}^{m}C_{ds}TₖₛGₖₛ^{m}Cₖ | | | | | |
| 570340 | GₖₛGₖₛAₖₛ^{m}C_{ds}A_{ds}G_{ds}A_{ds}G_{ds}A_{ds}A_{ds}A_{ds}T_{ds} | 46.7 | 1597 | 1612 | 722 | 1189 |
| | G_{ds}TₖₛTₖₛGₖ | | | | | |
| 570341 | GₖₛGₖₛ^{m}CₖₛA_{ds}T_{ds}A_{ds}G_{ds}G_{ds}A_{ds}^{m}C_{ds}A_{ds}G_{ds} | 35.6 | 1603 | 1618 | 723 | 1190 |
| | A_{ds}GₖₛAₖₛAₖ | | | | | |
| 570342 | GₖₛTₖₛGₖₛG_{ds}^{m}C_{ds}A_{ds}T_{ds}A_{ds}G_{ds}G_{ds}A_{ds}^{m}C_{ds} | 34.8 | 1605 | 1620 | 724 | 1191 |
| | A_{ds}GₖₛAₖₛGₖ | | | | | |
| 570343 | TₖₛGₖₛGₖₛT_{ds}G_{ds}G_{ds}^{m}C_{ds}A_{ds}T_{ds}A_{ds}G_{ds}G_{ds}A_{ds} | 60.3 | 1607 | 1622 | 725 | 1192 |
| | ^{m}CₖₛAₖₛGₖ | | | | | |
| 570344 | ^{m}CₖₛTₖₛTₖₛA_{ds}^{m}C_{ds}T_{ds}^{m}C_{ds}T_{ds}G_{ds}^{m}C_{ds}^{m}C_{ds}^{m} | 49.6 | 1627 | 1642 | 726 | 1193 |
| | C_{ds}^{m}C_{ds}Tₖₛ^{m}Cₖₛ^{m}Cₖ | | | | | |
| 570345 | Aₖₛ^{m}Cₖₛ^{m}CₖₛT_{ds}T_{ds}A_{ds}^{m}C_{ds}T_{ds}^{m}C_{ds}T_{ds}G_{ds}^{m} | 48.6 | 1629 | 1644 | 727 | 1194 |
| | C_{ds}^{m}C_{ds}^{m}Cₖₛ^{m}CₖₛTₖ | | | | | |
| 570346 | TₖₛGₖₛAₖₛ^{m}C_{ds}^{m}C_{ds}T_{ds}T_{ds}A_{ds}^{m}C_{ds}T_{ds}^{m}C_{ds}T_{ds} | 36.8 | 1631 | 1646 | 728 | 1195 |
| | G_{ds}^{m}Cₖₛ^{m}Cₖₛ^{m}Cₖ | | | | | |
| 570347 | Gₖₛ^{m}CₖₛTₖₛG_{ds}A_{ds}^{m}C_{ds}^{m}C_{ds}T_{ds}T_{ds}A_{ds}^{m}C_{ds}T_{ds} | 53.5 | 1633 | 1648 | 729 | 1196 |
| | ^{m}C_{ds}TₖₛGₖₛ^{m}Cₖ | | | | | |
| 570348 | ^{m}CₖₛTₖₛGₖₛ^{m}C_{ds}T_{ds}G_{ds}A_{ds}^{m}C_{ds}^{m}C_{ds}T_{ds}T_{ds}A_{ds} | 59 | 1635 | 1650 | 730 | 1197 |
| | ^{m}C_{ds}Tₖₛ^{m}CₖₛTₖ | | | | | |
| 570349 | ^{m}CₖₛTₖₛ^{m}CₖₛT_{ds}G_{ds}^{m}C_{ds}T_{ds}G_{ds}A_{ds}^{m}C_{ds}^{m}C_{ds} | 70.8 | 1637 | 1652 | 731 | 1198 |
| | T_{ds}T_{ds}Aₖₛ^{m}CₖₛTₖ | | | | | |
| 570350 | Gₖₛ^{m}Cₖₛ^{m}CₖₛT_{ds}^{m}C_{ds}T_{ds}G_{ds}^{m}C_{ds}T_{ds}G_{ds}A_{ds}^{m} | 54 | 1639 | 1654 | 732 | 1199 |
| | C_{ds}^{m}C_{ds}TₖₛTₖₛAₖ | | | | | |
| 570351 | ^{m}Cₖₛ^{m}CₖₛAₖₛT_{ds}G_{ds}G_{ds}^{m}C_{ds}T_{ds}^{m}C_{ds}T_{ds}G_{ds}A_{ds} | 52.6 | 1666 | 1681 | 733 | 1200 |
| | G_{ds}Tₖₛ^{m}CₖₛAₖ | | | | | |
| 570352 | AₖₛGₖₛ^{m}Cₖₛ^{m}C_{ds}A_{ds}T_{ds}G_{ds}G_{ds}^{m}C_{ds}T_{ds}^{m}C_{ds}T_{ds} | 60.7 | 1668 | 1683 | 734 | 1201 |
| | G_{ds}AₖₛGₖₛTₖ | | | | | |
| 570353 | TₖₛAₖₛAₖₛG_{ds}^{m}C_{ds}^{m}C_{ds}A_{ds}T_{ds}G_{ds}G_{ds}^{m}C_{ds}T_{ds} | 82.3 | 1670 | 1685 | 735 | 1202 |
| | ^{m}C_{ds}TₖₛGₖₛAₖ | | | | | |
| 570354 | TₖₛAₖₛGₖₛ^{m}C_{ds}^{m}C_{ds}T_{ds}G_{ds}^{m}C_{ds}T_{ds}G_{ds}T_{ds}G_{ds} | 40.8 | 1687 | 1702 | 736 | 1203 |
| | A_{ds}^{m}CₖₛTₖₛ^{m}Cₖ | | | | | |
| 570355 | AₖₛTₖₛGₖₛG_{ds}G_{ds}A_{ds}G_{ds}G_{ds}^{m}C_{ds}T_{ds}G_{ds}T_{ds}T_{ds} | 90.7 | 1707 | 1722 | 737 | 1204 |
| | GₖₛGₖₛ^{m}Cₖ | | | | | |
| 570356 | ^{m}Cₖₛ^{m}CₖₛAₖₛT_{ds}G_{ds}G_{ds}G_{ds}A_{ds}G_{ds}G_{ds}^{m}C_{ds}T_{ds} | 73.9 | 1709 | 1724 | 738 | 1205 |
| | G_{ds}TₖₛTₖₛGₖ | | | | | |
| 570357 | GₖₛGₖₛ^{m}Cₖₛ^{m}C_{ds}A_{ds}T_{ds}G_{ds}G_{ds}G_{ds}A_{ds}G_{ds}G_{ds} | 94.9 | 1711 | 1726 | 739 | 1206 |
| | ^{m}C_{ds}TₖₛGₖₛTₖ | | | | | |
| 570358 | GₖₛTₖₛGₖₛ^{m}C_{ds}A_{ds}G_{ds}A_{ds}G_{ds}A_{ds}G_{ds}G_{ds}^{m}C_{ds} | 73.5 | 1720 | 1735 | 740 | 1207 |
| | ^{m}C_{ds}AₖₛTₖₛGₖ | | | | | |
| 570359 | GₖₛAₖₛGₖₛ^{m}C_{ds}T_{ds}^{m}C_{ds}^{m}C_{ds}^{m}C_{ds}A_{ds}G_{ds}^{m}C_{ds} | 70.2 | 1759 | 1774 | 741 | 1208 |
| | A_{ds}T_{ds}GₖₛAₖₛ^{m}Cₖ | | | | | |
| 570360 | AₖₛGₖₛGₖₛG_{ds}A_{ds}G_{ds}^{m}C_{ds}T_{ds}^{m}C_{ds}^{m}C_{ds}^{m}C_{ds} | 56.1 | 1762 | 1777 | 742 | 1209 |
| | A_{ds}G_{ds}^{m}CₖₛAₖₛTₖ | | | | | |
| 570361 | Gₖₛ^{m}Cₖₛ^{m}CₖₛA_{ds}T_{ds}A_{ds}G_{ds}A_{ds}G_{ds}^{m}C_{ds}^{m}C_{ds}^{m} | 54.9 | 1799 | 1814 | 743 | 1210 |
| | C_{ds}A_{ds}^{m}CₖₛTₖₛTₖ | | | | | |
| 570362 | GₖₛGₖₛGₖₛ^{m}C_{ds}^{m}C_{ds}A_{ds}T_{ds}A_{ds}G_{ds}A_{ds}G_{ds}^{m}C_{ds} | 78.1 | 1801 | 1816 | 744 | 1211 |
| | ^{m}C_{ds}^{m}CₖₛAₖₛ^{m}Cₖ | | | | | |
| 570363 | AₖₛTₖₛGₖₛ^{m}C_{ds}T_{ds}G_{ds}G_{ds}^{m}C_{ds}^{m}C_{ds}^{m}C_{ds}T_{ds}^{m} | 76.2 | 1848 | 1863 | 745 | 1212 |
| | C_{ds}^{m}C_{ds}TₖₛGₖₛGₖ | | | | | |
| 570364 | AₖₛGₖₛ^{m}CₖₛT_{ds}G_{ds}^{m}C_{ds}^{m}C_{ds}^{m}C_{ds}^{m}C_{ds}A_{ds}T_{ds} | 92.6 | 1857 | 1872 | 746 | 1213 |
| | G_{ds}^{m}C_{ds}TₖₛGₖₛGₖ | | | | | |
| 570365 | ^{m}CₖₛGₖₛ^{m}Cₖₛ^{m}C_{ds}^{m}C_{ds}^{m}C_{ds}T_{ds}G_{ds}G_{ds}^{m}C_{ds}A_{ds} | 73.6 | 1867 | 1882 | 747 | 1214 |
| | G_{ds}^{m}C_{ds}TₖₛGₖₛ^{m}Cₖ | | | | | |
| 570366 | TₖₛGₖₛ^{m}CₖₛG_{ds}^{m}C_{ds}^{m}C_{ds}^{m}C_{ds}^{m}C_{ds}T_{ds}G_{ds}G_{ds}^{m} | 76.6 | 1869 | 1884 | 748 | 1215 |
| | C_{ds}A_{ds}Gₖₛ^{m}CₖₛTₖ | | | | | |
| 570367 | Gₖₛ^{m}CₖₛTₖₛG_{ds}^{m}C_{ds}G_{ds}^{m}C_{ds}^{m}C_{ds}^{m}C_{ds}^{m}C_{ds}T_{ds} | 79.1 | 1871 | 1886 | 749 | 1216 |
| | G_{ds}G_{ds}^{m}CₖₛAₖₛGₖ | | | | | |
| 570368 | ^{m}CₖₛGₖₛGₖₛ^{m}C_{ds}T_{ds}G_{ds}^{m}C_{ds}G_{ds}^{m}C_{ds}^{m}C_{ds}^{m}C_{ds} | 82.9 | 1873 | 1888 | 750 | 1217 |
| | ^{m}C_{ds}T_{ds}GₖₛGₖₛ^{m}Cₖ | | | | | |
| 570369 | GₖₛTₖₛ^{m}CₖₛG_{ds}G_{ds}^{m}C_{ds}T_{ds}G_{ds}^{m}C_{ds}G_{ds}^{m}C_{ds}^{m} | 47.5 | 1875 | 1890 | 751 | 1218 |
| | C_{ds}^{m}C_{ds}^{m}CₖₛTₖₛGₖ | | | | | |
| 570370 | ^{m}CₖₛTₖₛGₖₛT_{ds}^{m}C_{ds}G_{ds}G_{ds}^{m}C_{ds}T_{ds}G_{ds}^{m}C_{ds}G_{ds} | 79.6 | 1877 | 1892 | 752 | 1219 |
| | ^{m}C_{ds}^{m}Cₖₛ^{m}Cₖₛ^{m}Cₖ | | | | | |
| 570371 | Gₖₛ^{m}Cₖₛ^{m}CₖₛT_{ds}G_{ds}T_{ds}^{m}C_{ds}G_{ds}G_{ds}^{m}C_{ds}T_{ds}G_{ds} | 58.4 | 1879 | 1894 | 753 | 1220 |
| | ^{m}C_{ds}Gₖₛ^{m}Cₖₛ^{m}Cₖ | | | | | |
| 570372 | ^{m}CₖₛTₖₛGₖₛ^{m}C_{ds}^{m}C_{ds}T_{ds}G_{ds}T_{ds}^{m}C_{ds}G_{ds}G_{ds}^{m} | 49.9 | 1881 | 1896 | 754 | 1221 |
| | C_{ds}T_{ds}Gₖₛ^{m}CₖₛGₖ | | | | | |
| 570373 | Aₖₛ^{m}Cₖₛ^{m}CₖₛT_{ds}G_{ds}^{m}C_{ds}^{m}C_{ds}T_{ds}G_{ds}T_{ds}^{m}C_{ds} | 27.4 | 1883 | 1898 | 755 | 1222 |
| | G_{ds}G_{ds}^{m}CₖₛTₖₛGₖ | | | | | |
| 570374 | Aₖₛ^{m}CₖₛAₖₛ^{m}C_{ds}^{m}C_{ds}T_{ds}G_{ds}^{m}C_{ds}^{m}C_{ds}T_{ds}G_{ds} | 54.3 | 1885 | 1900 | 756 | 1223 |
| | T_{ds}^{m}C_{ds}GₖₛGₖₛ^{m}Cₖ | | | | | |
| 570375 | GₖₛAₖₛAₖₛ^{m}C_{ds}A_{ds}^{m}C_{ds}^{m}C_{ds}T_{ds}G_{ds}^{m}C_{ds}^{m}C_{ds} | 50.5 | 1887 | 1902 | 757 | 1224 |
| | T_{ds}G_{ds}Tₖₛ^{m}CₖₛGₖ | | | | | |
| 570376 | ^{m}Cₖₛ^{m}CₖₛGₖₛA_{ds}A_{ds}^{m}C_{ds}A_{ds}^{m}C_{ds}^{m}C_{ds}T_{ds}G_{ds} | 57.7 | 1889 | 1904 | 758 | 1225 |
| | ^{m}C_{ds}^{m}C_{ds}TₖₛGₖₛTₖ | | | | | |
| 570377 | ^{m}CₖₛGₖₛ^{m}CₖₛC_{ds}G_{ds}A_{ds}A_{ds}^{m}C_{ds}A_{ds}^{m}C_{ds}^{m}C_{ds} | 69.3 | 1891 | 1906 | 759 | 1226 |
| | T_{ds}G_{ds}^{m}Cₖₛ^{m}CₖₛTₖ | | | | | |
| 570378 | ^{m}Cₖₛ^{m}CₖₛTₖₛG_{ds}G_{ds}G_{ds}^{m}C_{ds}A_{ds}^{m}C_{ds}^{m}C_{ds}T_{ds} | 188.2 | 1925 | 1940 | 760 | 1227 |
| | G_{ds}T_{ds}TₖₛGₖₛGₖ | | | | | |
| 570379 | GₖₛTₖₛGₖₛ^{m}C_{ds}^{m}C_{ds}T_{ds}G_{ds}G_{ds}G_{ds}^{m}C_{ds}A_{ds}^{m}C_{ds} | 111.5 | 1928 | 1943 | 761 | 1228 |
| | ^{m}C_{ds}TₖₛGₖₛTₖ | | | | | |
| 570380 | ^{m}CₖₛGₖₛ^{m}Cₖₛ^{m}C_{ds}^{m}C_{ds}T_{ds}^{m}C_{ds}^{m}C_{ds}^{m}C_{ds}A_{ds}G_{ds} | 78 | 1938 | 1953 | 762 | 1229 |
| | T_{ds}G_{ds}^{m}Cₖₛ^{m}CₖₛTₖ | | | | | |
| 570381 | Aₖₛ^{m}Cₖₛ^{m}CₖₛG_{ds}^{m}C_{ds}^{m}C_{ds}^{m}C_{ds}T_{ds}^{m}C_{ds}^{m}C_{ds}^{m} | 74.9 | 1940 | 1955 | 763 | 1230 |
| | C_{ds}A_{ds}G_{ds}TₖₛGₖₛ^{m}Cₖ | | | | | |
| 570382 | Tₖₛ^{m}CₖₛAₖₛ^{m}C_{ds}^{m}C_{ds}G_{ds}^{m}C_{ds}^{m}C_{ds}^{m}C_{ds}T_{ds}^{m} | 71.6 | 1942 | 1957 | 764 | 1231 |
| | C_{ds}^{m}C_{ds}^{m}C_{ds}AₖₛGₖₛTₖ | | | | | |
| 570383 | AₖₛGₖₛTₖₛ^{m}C_{ds}A_{ds}^{m}C_{ds}^{m}C_{ds}G_{ds}^{m}C_{ds}^{m}C_{ds}^{m}C_{ds} | 62.1 | 1944 | 1959 | 765 | 1232 |
| | T_{ds}^{m}C_{ds}^{m}Cₖₛ^{m}CₖₛAₖ | | | | | |
| 570384 | TₖₛGₖₛAₖₛG_{ds}T_{ds}^{m}C_{ds}A_{ds}^{m}C_{ds}^{m}C_{ds}G_{ds}^{m}C_{ds}^{m} | 65.6 | 1946 | 1961 | 766 | 1233 |
| | C_{ds}^{m}C_{ds}Tₖₛ^{m}Cₖₛ^{m}Cₖ | | | | | |
| 570385 | ^{m}CₖₛGₖₛTₖₛG_{ds}A_{ds}G_{ds}T_{ds}^{m}C_{ds}A_{ds}^{m}C_{ds}^{m}C_{ds} | 37.3 | 1948 | 1963 | 767 | 1234 |
| | G_{ds}^{m}C_{ds}^{m}Cₖₛ^{m}CₖₛTₖ | | | | | |
| 570386 | ^{m}CₖₛAₖₛAₖₛA_{ds}G_{ds}^{m}C_{ds}T_{ds}G_{ds}G_{ds}T_{ds}T_{ds}^{m}C_{ds} | 30.5 | 1974 | 1989 | 768 | 1235 |
| | T_{ds}^{m}Cₖₛ^{m}Cₖₛ^{m}Cₖ | | | | | |
| 570387 | TₖₛGₖₛ^{m}CₖₛA_{ds}A_{ds}A_{ds}G_{ds}^{m}C_{ds}T_{ds}G_{ds}G_{ds}T_{ds} | 35.8 | 1976 | 1991 | 769 | 1236 |
| | T_{ds}^{m}CₖₛTₖₛ^{m}Cₖ | | | | | |
| 570388 | Tₖₛ^{m}CₖₛTₖₛG_{ds}^{m}C_{ds}A_{ds}A_{ds}A_{ds}G_{ds}^{m}C_{ds}T_{ds}G_{ds} | 30.1 | 1978 | 1993 | 770 | 1237 |
| | G_{ds}TₖₛTₖₛ^{m}Cₖ | | | | | |
| 570389 | TₖₛGₖₛTₖₛ^{m}C_{ds}T_{ds}G_{ds}^{m}C_{ds}A_{ds}A_{ds}A_{ds}G_{ds}^{m}C_{ds} | 50.1 | 1980 | 1995 | 771 | 1238 |
| | T_{ds}GₖₛGₖₛTₖ | | | | | |
| 570390 | ^{m}Cₖₛ^{m}CₖₛTₖₛG_{ds}T_{ds}^{m}C_{ds}T_{ds}G_{ds}^{m}C_{ds}A_{ds}A_{ds}A_{ds} | 36 | 1982 | 1997 | 772 | 1239 |
| | G_{ds}^{m}CₖₛTₖₛGₖ | | | | | |
| 570391 | ^{m}CₖₛGₖₛ^{m}Cₖₛ^{m}C_{ds}T_{ds}G_{ds}T_{ds}^{m}C_{ds}T_{ds}G_{ds}^{m}C_{ds} | 31.1 | 1984 | 1999 | 773 | 1240 |
| | A_{ds}A_{ds}AₖₛGₖₛ^{m}Cₖ | | | | | |
| 570392 | TₖₛTₖₛGₖₛT_{ds}^{m}C_{ds}^{m}C_{ds}^{m}C_{ds}T_{ds}^{m}C_{ds}^{m}C_{ds}T_{ds} | 62.9 | 2022 | 2037 | 774 | 1241 |
| | G_{ds}G_{ds}AₖₛTₖₛ^{m}Cₖ | | | | | |
| 570393 | AₖₛGₖₛTₖₛT_{ds}G_{ds}T_{ds}^{m}C_{ds}^{m}C_{ds}^{m}C_{ds}T_{ds}^{m}C_{ds}^{m} | 57.1 | 2024 | 2039 | 775 | 1242 |
| | C_{ds}T_{ds}GₖₛGₖₛAₖ | | | | | |
| 570394 | AₖₛAₖₛAₖₛG_{ds}T_{ds}T_{ds}G_{ds}T_{ds}^{m}C_{ds}^{m}C_{ds}^{m}C_{ds}T_{ds} | 56.2 | 2026 | 2041 | 776 | 1243 |
| | ^{m}C_{ds}^{m}CₖₛTₖₛGₖ | | | | | |
| 570395 | ^{m}Cₖₛ^{m}CₖₛAₖₛA_{ds}A_{ds}G_{ds}T_{ds}T_{ds}G_{ds}T_{ds}^{m}C_{ds}^{m}C_{ds} | 48.9 | 2028 | 2043 | 777 | 1244 |
| | ^{m}C_{ds}Tₖₛ^{m}Cₖₛ^{m}Cₖ | | | | | |
| 570396 | Aₖₛ^{m}Cₖₛ^{m}Cₖₛ^{m}C_{ds}A_{ds}A_{ds}A_{ds}G_{ds}T_{ds}T_{ds}G_{ds}T_{ds} | 59.9 | 2030 | 2045 | 778 | 1245 |
| | ^{m}C_{ds}^{m}Cₖₛ^{m}CₖₛTₖ | | | | | |
| 570397 | GₖₛAₖₛAₖₛ^{m}C_{ds}^{m}C_{ds}^{m}C_{ds}A_{ds}A_{ds}A_{ds}G_{ds}T_{ds}T_{ds} | 47.9 | 2032 | 2047 | 779 | 1246 |
| | G_{ds}Tₖₛ^{m}Cₖₛ^{m}Cₖ | | | | | |
| 570398 | GₖₛAₖₛAₖₛG_{ds}A_{ds}A_{ds}^{m}C_{ds}^{m}C_{ds}^{m}C_{ds}A_{ds}A_{ds}A_{ds} | 60 | 2035 | 2050 | 780 | 1247 |
| | G_{ds}TₖₛTₖₛGₖ | | | | | |
| 570399 | ^{m}Cₖₛ^{m}CₖₛAₖₛG_{ds}A_{ds}A_{ds}G_{ds}A_{ds}A_{ds}^{m}C_{ds}^{m}C_{ds}^{m} | 51.2 | 2038 | 2053 | 781 | 1248 |
| | C_{ds}A_{ds}AₖₛAₖₛGₖ | | | | | |
| 570400 | ^{m}CₖₛAₖₛ^{m}Cₖₛ^{m}C_{ds}^{m}C_{ds}A_{ds}G_{ds}A_{ds}A_{ds}G_{ds}A_{ds} | 51.1 | 2041 | 2056 | 782 | 1249 |
| | A_{ds}^{m}C_{ds}^{m}Cₖₛ^{m}CₖₛAₖ | | | | | |
| 570401 | Gₖₛ^{m}CₖₛAₖₛG_{ds}A_{ds}A_{ds}^{m}C_{ds}^{m}C_{ds}T_{ds}A_{ds}^{m}C_{ds} | 44.9 | 2066 | 2081 | 783 | 1250 |
| | A_{ds}A_{ds}AₖₛAₖₛGₖ | | | | | |
| 570402 | GₖₛTₖₛGₖₛ^{m}C_{ds}A_{ds}G_{ds}A_{ds}A_{ds}^{m}C_{ds}^{m}C_{ds}T_{ds}A_{ds} | 53 | 2068 | 2083 | 784 | 1251 |
| | ^{m}C_{ds}AₖₛAₖₛAₖ | | | | | |
| 570403 | GₖₛGₖₛGₖₛT_{ds}G_{ds}^{m}C_{ds}A_{ds}G_{ds}A_{ds}A_{ds}^{m}C_{ds}^{m}C_{ds} | 51.5 | 2070 | 2085 | 785 | 1252 |
| | T_{ds}Aₖₛ^{m}CₖₛAₖ | | | | | |
| 570404 | GₖₛTₖₛGₖₛG_{ds}G_{ds}T_{ds}G_{ds}^{m}C_{ds}A_{ds}G_{ds}A_{ds}A_{ds}^{m} | 57.4 | 2072 | 2087 | 786 | 1253 |
| | C_{ds}^{m}CₖₛTₖₛAₖ | | | | | |
| 570405 | ^{m}Cₖₛ^{m}CₖₛAₖₛ^{m}C_{ds}A_{ds}^{m}C_{ds}G_{ds}G_{ds}^{m}C_{ds}T_{ds}^{m}C_{ds} | 54.3 | 2116 | 2131 | 787 | 1254 |
| | A_{ds}T_{ds}AₖₛGₖₛGₖ | | | | | |
| 570406 | Aₖₛ^{m}Cₖₛ^{m}Cₖₛ^{m}C_{ds}A_{ds}^{m}C_{ds}A_{ds}^{m}C_{ds}G_{ds}G_{ds}^{m}C_{ds} | 43.6 | 2118 | 2133 | 788 | 1255 |
| | T_{ds}^{m}C_{ds}AₖₛTₖₛAₖ | | | | | |
| 570407 | TₖₛGₖₛAₖₛ^{m}C_{ds}^{m}C_{ds}^{m}C_{ds}A_{ds}^{m}C_{ds}A_{ds}^{m}C_{ds}G_{ds} | 44 | 2120 | 2135 | 789 | 1256 |
| | G_{ds}^{m}C_{ds}Tₖₛ^{m}CₖₛAₖ | | | | | |
| 570408 | Gₖₛ^{m}CₖₛTₖₛG_{ds}A_{ds}^{m}C_{ds}^{m}C_{ds}^{m}C_{ds}A_{ds}^{m}C_{ds}A_{ds} | 56.5 | 2122 | 2137 | 790 | 1257 |
| | C_{ds}G_{ds}Gₖₛ^{m}CₖₛTₖ | | | | | |
| 570409 | TₖₛGₖₛGₖₛ^{m}C_{ds}T_{ds}G_{ds}A_{ds}^{m}C_{ds}^{m}C_{ds}^{m}C_{ds}A_{ds}^{m} | 54.8 | 2124 | 2139 | 791 | 1258 |
| | C_{ds}A_{ds}^{m}CₖₛGₖₛGₖ | | | | | |
| 570410 | GₖₛGₖₛTₖₛG_{ds}G_{ds}^{m}C_{ds}T_{ds}G_{ds}A_{ds}^{m}C_{ds}^{m}C_{ds}^{m} | 46.8 | 2126 | 2141 | 792 | 1259 |
| | C_{ds}A_{ds}^{m}CₖₛAₖₛ^{m}Cₖ | | | | | |
| 570411 | AₖₛTₖₛGₖₛG_{ds}T_{ds}G_{ds}G_{ds}^{m}C_{ds}T_{ds}G_{ds}A_{ds}^{m}C_{ds}^{m} | 73.8 | 2128 | 2143 | 793 | 1260 |
| | C_{ds}^{m}CₖₛAₖₛ^{m}Cₖ | | | | | |
| 570412 | GₖₛAₖₛAₖₛT_{ds}G_{ds}G_{ds}T_{ds}G_{ds}G_{ds}^{m}C_{ds}T_{ds}G_{ds}A_{ds} | 43.5 | 2130 | 2145 | 794 | 1261 |
| | ^{m}Cₖₛ^{m}Cₖₛ^{m}Cₖ | | | | | |
| 570413 | ^{m}CₖₛTₖₛAₖₛA_{ds}A_{ds}G_{ds}G_{ds}A_{ds}^{m}C_{ds}G_{ds}^{m}C_{ds}A_{ds} | 54.4 | 2159 | 2174 | 795 | 1262 |
| | G_{ds}GₖₛGₖₛAₖ | | | | | |
| 570414 | AₖₛAₖₛ^{m}CₖₛT_{ds}A_{ds}A_{ds}A_{ds}G_{ds}G_{ds}A_{ds}^{m}C_{ds}G_{ds} | 49.1 | 2161 | 2176 | 796 | 1263 |
| | ^{m}C_{ds}AₖₛGₖₛGₖ | | | | | |
| 570415 | GₖₛAₖₛGₖₛA_{ds}A_{ds}^{m}C_{ds}T_{ds}A_{ds}A_{ds}A_{ds}G_{ds}G_{ds} | 35.4 | 2164 | 2179 | 797 | 1264 |
| | A_{ds}^{m}CₖₛGₖₛ^{m}Ck | | | | | |

TABLE 17
Inhibition of human DMPK RNA transcript in HepG2 cell stargeting SEQ ID NO: 2

| | | | Start | Stop | | |
|---|---|---|---|---|---|---|
| | | | Site on | Site on | | Modified |
| ISIS | | % Target | Seq | Seq | Unmodified | Seq ID |
| No. | Sequence | Expression | ID: 2 | ID: 2 | Seq ID No. | No. |
| UTC | N/A | 100 | N/A | N/A | | |
| 445569 | ^{m}CₑₛGₑₛGₑₛAₑₛGₑₛ^{m}C_{ds}G_{ds}G_{ds}T_{ds}T_{ds}G_{ds}T_{ds} | 41.4 | 13226 | 13245 | 24 | 1443 |
| | G_{ds}A_{ds}A_{ds}^{m}CₑₛTₑₛGₑₛGₑₛ^{m}Cₑ | | | | | |
| 486178 | Aₖₛ^{m}CₖₛAₖₛA_{ds}T_{ds}A_{ds}A_{ds}A_{ds}T_{ds}A_{ds}^{m}C_{ds}^{m} | 24 | 13836 | 13851 | 23 | 881 |
| | C_{ds}G_{ds}AₖₛGₖₛGₖ | | | | | |
| 570493 | AₖₛTₖₛTₖₛG_{ds}G_{ds}T_{ds}^{m}C_{ds}^{m}C_{ds}^{m}C_{ds}A_{ds}A_{ds} | 112.1 | 3973 | 3988 | 798 | 1265 |
| | G_{ds}^{m}C_{ds}^{m}Cₖₛ^{m}Cₖₛ^{m}Cₖ | | | | | |
| 570494 | ^{m}Cₖₛ^{m}CₖₛAₖₛT_{ds}T_{ds}G_{ds}G_{ds}T_{ds}^{m}C_{ds}^{m}C_{ds}^{m}C_{ds} | 91.3 | 3975 | 3990 | 799 | 1266 |
| | A_{ds}A_{ds}Gₖₛ^{m}Cₖₛ^{m}Cₖ | | | | | |
| 570495 | Gₖₛ^{m}Cₖₛ^{m}Cₖₛ^{m}C_{ds}A_{ds}T_{ds}T_{ds}G_{ds}G_{ds}T_{ds}^{m}C_{ds} | 103.4 | 3977 | 3992 | 800 | 1267 |
| | ^{m}C_{ds}^{m}C_{ds}AₖₛAₖₛGₖ | | | | | |
| 570496 | Aₖₛ^{m}CₖₛGₖₛ^{m}C_{ds}^{m}C_{ds}^{m}C_{ds}A_{ds}T_{ds}T_{ds}G_{ds}G_{ds} | 67.8 | 3979 | 3994 | 801 | 1268 |
| | T_{ds}^{m}C_{ds}^{m}Cₖₛ^{m}CₖₛAₖ | | | | | |
| 570497 | ^{m}Cₖₛ^{m}CₖₛAₖₛ^{m}C_{ds}G_{ds}^{m}C_{ds}^{m}C_{ds}^{m}C_{ds}A_{ds}T_{ds} | 77.3 | 3981 | 3996 | 802 | 1269 |
| | T_{ds}G_{ds}G_{ds}Tₖₛ^{m}Cₖₛ^{m}Cₖ | | | | | |
| 570498 | ^{m}CₖₛAₖₛ^{m}Cₖₛ^{m}C_{ds}A_{ds}^{m}C_{ds}G_{ds}^{m}C_{ds}^{m}C_{ds}^{m}C_{ds} | 98.3 | 3983 | 3998 | 803 | 1270 |
| | A_{ds}T_{ds}T_{ds}GₖₛGₖₛTₖ | | | | | |
| 570499 | AₖₛGₖₛAₖₛ^{m}C_{ds}^{m}C_{ds}^{m}C_{ds}A_{ds}A_{ds}^{m}C_{ds}T_{ds}^{m} | 63.7 | 4036 | 4051 | 804 | 1271 |
| | C_{ds}^{m}C_{ds}A_{ds}^{m}Cₖₛ^{m}Cₖₛ^{m}Cₖ | | | | | |
| 570500 | Tₖₛ^{m}CₖₛAₖₛ^{m}C_{ds}^{m}C_{ds}T_{ds}^{m}C_{ds}G_{ds}^{m}C_{ds}^{m}C_{ds} | 43 | 4181 | 4196 | 805 | 1272 |
| | ^{m}C_{ds}^{m}C_{ds}T_{ds}^{m}CₖₛTₖₛTₖ | | | | | |
| 570501 | ^{m}Cₖₛ^{m}CₖₛTₖₛ^{m}C_{ds}A_{ds}^{m}C_{ds}^{m}C_{ds}T_{ds}^{m}C_{ds}G_{ds} | 38.1 | 4183 | 4198 | 806 | 1273 |
| | ^{m}C_{ds}^{m}C_{ds}^{m}C_{ds}^{m}CₖₛTₖₛ^{m}Cₖ | | | | | |
| 570502 | AₖₛGₖₛ^{m}Cₖₛ^{m}C_{ds}^{m}C_{ds}^{m}C_{ds}T_{ds}^{m}C_{ds}A_{ds}^{m}C_{ds} | 85.4 | 4187 | 4202 | 807 | 1274 |
| | ^{m}C_{ds}T_{ds}^{m}C_{ds}Gₖₛ^{m}Cₖₛ^{m}Cₖ | | | | | |
| 570503 | ^{m}CₖₛTₖₛ^{m}CₖₛA_{ds}A_{ds}A_{ds}G_{ds}^{m}C_{ds}^{m}C_{ds}^{m}C_{ds}^{m} | 115.8 | 4210 | 4225 | 808 | 1275 |
| | C_{ds}^{m}C_{ds}^{m}C_{ds}Aₖₛ^{m}CₖₛGₖ | | | | | |
| 570504 | AₖₛTₖₛ^{m}Cₖₛ^{m}C_{ds}T_{ds}^{m}C_{ds}A_{ds}A_{ds}A_{ds}G_{ds}^{m}C_{ds} | 114.5 | 4213 | 4228 | 809 | 1276 |
| | ^{m}C_{ds}^{m}C_{ds}^{m}Cₖₛ^{m}Cₖₛ^{m}Cₖ | | | | | |
| 570505 | GₖₛGₖₛAₖₛT_{ds}^{m}C_{ds}^{m}C_{ds}T_{ds}^{m}C_{ds}A_{ds}A_{ds}A_{ds} | 88.1 | 4215 | 4230 | 810 | 1277 |
| | G_{ds}^{m}C_{ds}^{m}Cₖₛ^{m}Cₖₛ^{m}Cₖ | | | | | |
| 570506 | Gₖₛ^{m}CₖₛGₖₛG_{ds}A_{ds}T_{ds}^{m}C_{ds}^{m}C_{ds}T_{ds}^{m}C_{ds}A_{ds} | 93.1 | 4217 | 4232 | 811 | 1278 |
| | A_{ds}A_{ds}Gₖₛ^{m}Cₖₛ^{m}Cₖ | | | | | |
| 570507 | Gₖₛ^{m}CₖₛGₖₛ^{m}C_{ds}G_{ds}G_{ds}A_{ds}T_{ds}^{m}C_{ds}^{m}C_{ds}T_{ds} | 102.9 | 4219 | 4234 | 812 | 1279 |
| | ^{m}C_{ds}A_{ds}AₖₛAₖₛGₖ | | | | | |
| 570508 | GₖₛGₖₛGₖₛ^{m}C_{ds}G_{ds}^{m}C_{ds}G_{ds}G_{ds}A_{ds}T_{ds}^{m}C_{ds} | 78.5 | 4221 | 4236 | 813 | 1280 |
| | ^{m}C_{ds}T_{ds}^{m}CₖₛAₖₛAₖ | | | | | |
| 570509 | GₖₛAₖₛGₖₛ^{m}C_{ds}T_{ds}G_{ds}^{m}C_{ds}A_{ds}G_{ds}^{m}C_{ds}^{m}C_{ds} | 192.2 | 4239 | 4254 | 814 | 1281 |
| | G_{ds}G_{ds}AₖₛGₖₛAₖ | | | | | |
| 570510 | AₖₛGₖₛGₖₛA_{ds}G_{ds}^{m}C_{ds}T_{ds}G_{ds}^{m}C_{ds}A_{ds}G_{ds}^{m} | 219.8 | 4241 | 4256 | 815 | 1282 |
| | C_{ds}^{m}C_{ds}GₖₛGₖₛAₖ | | | | | |
| 570511 | ^{m}CₖₛGₖₛGₖₛA_{ds}G_{ds}G_{ds}A_{ds}G_{ds}^{m}C_{ds}T_{ds}G_{ds}^{m} | 128.6 | 4244 | 4259 | 816 | 1283 |
| | C_{ds}A_{ds}Gₖₛ^{m}Cₖₛ^{m}Cₖ | | | | | |
| 570512 | Aₖₛ^{m}Cₖₛ^{m}Cₖₛ^{m}C_{ds}G_{ds}G_{ds}A_{ds}G_{ds}G_{ds}A_{ds}G_{ds} | 89.9 | 4247 | 4262 | 817 | 1284 |
| | ^{m}C_{ds}T_{ds}Gₖₛ^{m}CₖₛAₖ | | | | | |
| 570513 | Gₖₛ^{m}CₖₛAₖₛ^{m}C_{ds}^{m}C_{ds}^{m}C_{ds}G_{ds}G_{ds}A_{ds}G_{ds}G_{ds} | 96.1 | 4249 | 4264 | 818 | 1285 |
| | A_{ds}G_{ds}^{m}CₖₛTₖₛGₖ | | | | | |
| 570514 | GₖₛGₖₛGₖₛ^{m}C_{ds}A_{ds}^{m}C_{ds}^{m}C_{ds}^{m}C_{ds}G_{ds}G_{ds}A_{ds} | 67.8 | 4251 | 4266 | 819 | 1286 |
| | G_{ds}G_{ds}AₖₛGₖₛ^{m}Cₖ | | | | | |
| 570515 | ^{m}CₖₛAₖₛGₖₛG_{ds}G_{ds}^{m}C_{ds}A_{ds}^{m}C_{ds}^{m}C_{ds}^{m}C_{ds} | 64.2 | 4253 | 4268 | 820 | 1287 |
| | G_{ds}G_{ds}A_{ds}GₖₛGₖₛAₖ | | | | | |
| 570516 | TₖₛGₖₛ^{m}CₖₛA_{ds}G_{ds}G_{ds}G_{ds}^{m}C_{ds}A_{ds}^{m}C_{ds}^{m}C_{ds} | 62.2 | 4255 | 4270 | 821 | 1288 |
| | ^{m}C_{ds}G_{ds}GₖₛAₖₛGₖ | | | | | |
| 570517 | ^{m}Cₖₛ^{m}CₖₛTₖₛG_{ds}^{m}C_{ds}A_{ds}G_{ds}G_{ds}G_{ds}^{m}C_{ds}A_{ds} | 77.7 | 4257 | 4272 | 822 | 1289 |
| | ^{m}C_{ds}^{m}C_{ds}^{m}CₖₛGₖₛGₖ | | | | | |
| 570518 | ^{m}CₖₛGₖₛAₖₛ^{m}C_{ds}A_{ds}^{m}C_{ds}^{m}C_{ds}T_{ds}G_{ds}^{m}C_{ds} | 79 | 4262 | 4277 | 823 | 1290 |
| | A_{ds}G_{ds}G_{ds}Gₖₛ^{m}CₖₛAₖ | | | | | |
| 570519 | ^{m}CₖₛAₖₛ^{m}CₖₛG_{ds}A_{ds}^{m}C_{ds}A_{ds}^{m}C_{ds}^{m}C_{ds}T_{ds} | 68.5 | 4264 | 4279 | 824 | 1291 |
| | G_{ds}^{m}C_{ds}A_{ds}GₖₛGₖₛGₖ | | | | | |
| 570520 | AₖₛGₖₛ^{m}CₖₛA_{ds}^{m}C_{ds}G_{ds}A_{ds}^{m}C_{ds}A_{ds}^{m}C_{ds}^{m} | 39.8 | 4266 | 4281 | 825 | 1292 |
| | C_{ds}T_{ds}G_{ds}^{m}CₖₛAₖₛGₖ | | | | | |
| 570521 | GₖₛAₖₛAₖₛG_{ds}^{m}C_{ds}A_{ds}^{m}C_{ds}G_{ds}A_{ds}^{m}C_{ds}A_{ds} | 32.4 | 4268 | 4283 | 826 | 1293 |
| | ^{m}C_{ds}^{m}C_{ds}TₖₛGₖₛ^{m}Cₖ | | | | | |
| 570522 | ^{m}Cₖₛ^{m}CₖₛAₖₛG_{ds}G_{ds}T_{ds}A_{ds}G_{ds}T_{ds}T_{ds}^{m}C_{ds} | 41 | 4353 | 4368 | 827 | 1294 |
| | T_{ds}^{m}C_{ds}AₖₛTₖₛ^{m}Cₖ | | | | | |
| 570523 | ^{m}CₖₛAₖₛ^{m}Cₖₛ^{m}C_{ds}A_{ds}G_{ds}G_{ds}T_{ds}A_{ds}G_{ds}T_{ds} | 71.9 | 4355 | 4370 | 828 | 1295 |
| | T_{ds}^{m}C_{ds}Tₖₛ^{m}CₖₛAₖ | | | | | |
| 570524 | ^{m}CₖₛTₖₛ^{m}CₖₛA_{ds}^{m}C_{ds}^{m}C_{ds}A_{ds}G_{ds}G_{ds}T_{ds}A_{ds} | 105.9 | 4357 | 4372 | 829 | 1296 |
| | G_{ds}T_{ds}Tₖₛ^{m}CₖₛTₖ | | | | | |
| 570525 | AₖₛGₖₛ^{m}CₖₛT_{ds}^{m}C_{ds}A_{ds}^{m}C_{ds}^{m}C_{ds}A_{ds}G_{ds}G_{ds} | 99.3 | 4359 | 4374 | 830 | 1297 |
| | T_{ds}A_{ds}GₖₛTₖₛTₖ | | | | | |
| 570526 | GₖₛGₖₛAₖₛG_{ds}^{m}C_{ds}T_{ds}^{m}C_{ds}A_{ds}^{m}C_{ds}^{m}C_{ds}A_{ds} | 85.2 | 4361 | 4376 | 831 | 1298 |
| | G_{ds}G_{ds}TₖₛAₖₛGₖ | | | | | |
| 570527 | ^{m}Cₖₛ^{m}CₖₛGₖₛG_{ds}A_{ds}G_{ds}^{m}C_{ds}T_{ds}^{m}C_{ds}A_{ds}^{m} | 82.5 | 4363 | 4378 | 832 | 1299 |
| | C_{ds}^{m}C_{ds}A_{ds}GₖₛGₖₛTₖ | | | | | |
| 570528 | Gₖₛ^{m}Cₖₛ^{m}Cₖₛ^{m}C_{ds}G_{ds}G_{ds}A_{ds}G_{ds}^{m}C_{ds}T_{ds}^{m} | 60.5 | 4365 | 4380 | 833 | 1300 |
| | C_{ds}A_{ds}^{m}C_{ds}^{m}CₖₛAₖₛGₖ | | | | | |
| 570529 | TₖₛAₖₛGₖₛA_{ds}G_{ds}^{m}C_{ds}T_{ds}T_{ds}^{m}C_{ds}^{m}C_{ds}T_{ds}^{m} | 35.4 | 4435 | 4450 | 834 | 1301 |
| | C_{ds}T_{ds}^{m}Cₖₛ^{m}Cₖₛ^{m}Cₖ | | | | | |
| 570530 | ^{m}Cₖₛ^{m}CₖₛTₖₛA_{ds}G_{ds}A_{ds}G_{ds}^{m}C_{ds}T_{ds}T_{ds}^{m}C_{ds} | 29.4 | 4437 | 4452 | 835 | 1302 |
| | ^{m}C_{ds}T_{ds}^{m}CₖₛTₖₛ^{m}Cₖ | | | | | |
| 570531 | AₖₛTₖₛ^{m}Cₖₛ^{m}C_{ds}T_{ds}A_{ds}G_{ds}A_{ds}G_{ds}^{m}C_{ds}T_{ds} | 30.4 | 4439 | 4454 | 836 | 1303 |
| | T_{ds}^{m}C_{ds}^{m}CₖₛTₖₛ^{m}Cₖ | | | | | |
| 570532 | ^{m}CₖₛAₖₛAₖₛT_{ds}^{m}C_{ds}^{m}C_{ds}T_{ds}A_{ds}G_{ds}A_{ds}G_{ds}^{m} | 30.3 | 4441 | 4456 | 837 | 1304 |
| | C_{ds}T_{ds}Tₖₛ^{m}Cₖₛ^{m}Cₖ | | | | | |
| 570533 | ^{m}Cₖₛ^{m}Cₖₛ^{m}CₖₛA_{ds}A_{ds}T_{ds}^{m}C_{ds}^{m}C_{ds}T_{ds}A_{ds} | 54.1 | 4443 | 4458 | 838 | 1305 |
| | G_{ds}A_{ds}G_{ds}^{m}CₖₛTₖₛTₖ | | | | | |
| 570534 | ^{m}Cₖₛ^{m}Cₖₛ^{m}Cₖₛ^{m}C_{ds}^{m}C_{ds}A_{ds}A_{ds}T_{ds}^{m}C_{ds}^{m}C_{ds} | 60.1 | 4445 | 4460 | 839 | 1306 |
| | T_{ds}A_{ds}G_{ds}AₖₛGₖₛ^{m}Cₖ | | | | | |
| 570535 | ^{m}CₖₛAₖₛ^{m}Cₖₛ^{m}C_{ds}^{m}C_{ds}^{m}C_{ds}^{m}C_{ds}A_{ds}A_{ds}T_{ds} | 68.5 | 4447 | 4462 | 840 | 1307 |
| | ^{m}C_{ds}^{m}C_{ds}T_{ds}AₖₛGₖₛAₖ | | | | | |
| 570536 | AₖₛGₖₛ^{m}CₖₛA_{ds}^{m}C_{ds}^{m}C_{ds}^{m}C_{ds}^{m}C_{ds}^{m}C_{ds}A_{ds} | 37.5 | 4449 | 4464 | 841 | 1308 |
| | A_{ds}T_{ds}^{m}C_{ds}^{m}CₖₛTₖₛAₖ | | | | | |
| 570537 | Gₖₛ^{m}CₖₛAₖₛG_{ds}^{m}C_{ds}A_{ds}^{m}C_{ds}^{m}C_{ds}^{m}C_{ds}^{m}C_{ds} | 50.9 | 4451 | 4466 | 842 | 1309 |
| | ^{m}C_{ds}A_{ds}A_{ds}Tₖₛ^{m}Cₖₛ^{m}Cₖ | | | | | |
| 570538 | GₖₛGₖₛGₖₛ^{m}C_{ds}A_{ds}G_{ds}^{m}C_{ds}A_{ds}^{m}C_{ds}^{m}C_{ds}^{m} | 67.7 | 4453 | 4468 | 843 | 1310 |
| | C_{ds}^{m}C_{ds}^{m}C_{ds}AₖₛAₖₛTₖ | | | | | |
| 570539 | TₖₛGₖₛAₖₛ^{m}C_{ds}A_{ds}^{m}C_{ds}A_{ds}^{m}C_{ds}^{m}C_{ds}^{m}C_{ds} | 55.9 | 4498 | 4513 | 844 | 1311 |
| | T_{ds}^{m}C_{ds}T_{ds}TₖₛAₖₛ^{m}Cₖ | | | | | |
| 570540 | ^{m}Cₖₛ^{m}CₖₛTₖₛG_{ds}A_{ds}^{m}C_{ds}A_{ds}^{m}C_{ds}A_{ds}^{m}C_{ds}^{m} | 45.1 | 4500 | 4515 | 845 | 1312 |
| | C_{ds}^{m}C_{ds}T_{ds}^{m}CₖₛTₖₛTₖ | | | | | |
| 570541 | ^{m}CₖₛAₖₛ^{m}Cₖₛ^{m}C_{ds}T_{ds}G_{ds}A_{ds}^{m}C_{ds}A_{ds}^{m}C_{ds} | 30.9 | 4502 | 4517 | 846 | 1313 |
| | A_{ds}^{m}C_{ds}^{m}C_{ds}^{m}CₖₛTₖₛ^{m}Cₖ | | | | | |
| 570542 | Tₖₛ^{m}Cₖₛ^{m}CₖₛA_{ds}^{m}C_{ds}^{m}C_{ds}T_{ds}G_{ds}A_{ds}^{m}C_{ds} | 35 | 4504 | 4519 | 847 | 1314 |
| | A_{ds}^{m}C_{ds}A_{ds}^{m}Cₖₛ^{m}Cₖₛ^{m}Cₖ | | | | | |
| 570543 | ^{m}CₖₛAₖₛTₖₛ^{m}C_{ds}^{m}C_{ds}A_{ds}^{m}C_{ds}^{m}C_{ds}T_{ds}G_{ds} | 48 | 4506 | 4521 | 848 | 1315 |
| | A_{ds}^{m}C_{ds}A_{ds}^{m}CₖₛAₖₛ^{m}Cₖ | | | | | |
| 570544 | ^{m}CₖₛTₖₛ^{m}CₖₛA_{ds}T_{ds}^{m}C_{ds}^{m}C_{ds}A_{ds}^{m}C_{ds}^{m}C_{ds} | 37.1 | 4508 | 4523 | 849 | 1316 |
| | T_{ds}G_{ds}A_{ds}^{m}CₖₛAₖₛ^{m}Cₖ | | | | | |
| 570545 | ^{m}Cₖₛ^{m}Cₖₛ^{m}CₖₛT_{ds}^{m}C_{ds}A_{ds}T_{ds}^{m}C_{ds}^{m}C_{ds}A_{ds} | 46 | 4510 | 4525 | 850 | 1317 |
| | ^{m}C_{ds}^{m}C_{ds}T_{ds}GₖₛAₖₛ^{m}Cₖ | | | | | |
| 570546 | Gₖₛ^{m}Cₖₛ^{m}Cₖₛ^{m}C_{ds}^{m}C_{ds}T_{ds}^{m}C_{ds}A_{ds}T_{ds}^{m}C_{ds} | 79.2 | 4512 | 4527 | 851 | 1318 |
| | ^{m}C_{ds}A_{ds}^{m}C_{ds}^{m}CₖₛTₖₛGₖ | | | | | |
| 570547 | AₖₛGₖₛGₖₛ^{m}C_{ds}^{m}C_{ds}^{m}C_{ds}^{m}C_{ds}T_{ds}^{m}C_{ds}A_{ds} | 40.7 | 4514 | 4529 | 852 | 1319 |
| | T_{ds}^{m}C_{ds}^{m}C_{ds}Aₖₛ^{m}Cₖₛ^{m}Cₖ | | | | | |
| 570548 | GₖₛAₖₛAₖₛG_{ds}G_{ds}^{m}C_{ds}^{m}C_{ds}^{m}C_{ds}^{m}C_{ds}T_{ds}^{m} | 35.9 | 4516 | 4531 | 853 | 1320 |
| | C_{ds}A_{ds}T_{ds}^{m}Cₖₛ^{m}CₖₛAₖ | | | | | |
| 570549 | AₖₛGₖₛGₖₛT_{ds}A_{ds}A_{ds}G_{ds}A_{ds}G_{ds}A_{ds}^{m}C_{ds}^{m} | 18.8 | 4613 | 4628 | 854 | 1321 |
| | C_{ds}^{m}C_{ds}^{m}Cₖₛ^{m}Cₖₛ^{m}Cₖ | | | | | |
| 570550 | ^{m}Cₖₛ^{m}CₖₛAₖₛG_{ds}G_{ds}T_{ds}A_{ds}A_{ds}G_{ds}A_{ds}G_{ds} | 16.2 | 4615 | 4630 | 855 | 1322 |
| | A_{ds}^{m}C_{ds}^{m}Cₖₛ^{m}Cₖₛ^{m}Cₖ | | | | | |
| 570551 | TₖₛTₖₛ^{m}Cₖₛ^{m}C_{ds}A_{ds}G_{ds}G_{ds}T_{ds}A_{ds}A_{ds}G_{ds}A_{ds} | 38.9 | 4617 | 4632 | 856 | 1323 |
| | G_{ds}Aₖₛ^{m}Cₖₛ^{m}Cₖ | | | | | |
| 570552 | ^{m}Cₖₛ^{m}CₖₛAₖₛT_{ds}T_{ds}^{m}C_{ds}^{m}C_{ds}A_{ds}G_{ds}G_{ds}T_{ds} | 28.6 | 4620 | 4635 | 857 | 1324 |
| | A_{ds}A_{ds}GₖₛAₖₛGₖ | | | | | |
| 570553 | Tₖₛ^{m}Cₖₛ^{m}Cₖₛ^{m}C_{ds}A_{ds}T_{ds}T_{ds}^{m}C_{ds}^{m}C_{ds}A_{ds}G_{ds} | 42.6 | 4622 | 4637 | 858 | 1325 |
| | G_{ds}T_{ds}AₖₛAₖₛGₖ | | | | | |
| 570554 | TₖₛAₖₛTₖₛ^{m}C_{ds}^{m}C_{ds}^{m}C_{ds}A_{ds}T_{ds}T_{ds}^{m}C_{ds}^{m}C_{ds} | 31.8 | 4624 | 4639 | 859 | 1326 |
| | A_{ds}G_{ds}GₖₛTₖₛAₖ | | | | | |
| 570555 | ^{m}Cₖₛ^{m}CₖₛTₖₛA_{ds}T_{ds}^{m}C_{ds}^{m}C_{ds}^{m}C_{ds}A_{ds}T_{ds}T_{ds} | 62 | 4626 | 4641 | 860 | 1327 |
| | ^{m}C_{ds}^{m}C_{ds}AₖₛGₖₛGₖ | | | | | |
| 570556 | GₖₛAₖₛ^{m}Cₖₛ^{m}C_{ds}T_{ds}A_{ds}T_{ds}^{m}C_{ds}^{m}C_{ds}^{m}C_{ds} | 20 | 4628 | 4643 | 861 | 1328 |
| | A_{ds}T_{ds}T_{ds}^{m}Cₖₛ^{m}CₖₛAₖ | | | | | |
| 570557 | AₖₛAₖₛGₖₛA_{ds}^{m}C_{ds}^{m}C_{ds}T_{ds}A_{ds}T_{ds}^{m}C_{ds}^{m}C_{ds} | 29.8 | 4630 | 4645 | 862 | 1329 |
| | ^{m}C_{ds}A_{ds}TₖₛTₖₛ^{m}Cₖ | | | | | |
| 570558 | TₖₛGₖₛAₖₛA_{ds}G_{ds}A_{ds}^{m}C_{ds}^{m}C_{ds}T_{ds}A_{ds}T_{ds}^{m} | 45.5 | 4632 | 4647 | 863 | 1330 |
| | C_{ds}^{m}C_{ds}^{m}CₖₛAₖₛTₖ | | | | | |
| 570559 | TₖₛGₖₛGₖₛ^{m}C_{ds}^{m}C_{ds}^{m}C_{ds}^{m}C_{ds}G_{ds}T_{ds}T_{ds}A_{ds} | 72.7 | 4650 | 4665 | 864 | 1331 |
| | G_{ds}A_{ds}AₖₛTₖₛTₖ | | | | | |
| 570560 | AₖₛGₖₛTₖₛG_{ds}G_{ds}^{m}C_{ds}^{m}C_{ds}^{m}C_{ds}^{m}C_{ds}G_{ds}T_{ds} | 33.7 | 4652 | 4667 | 865 | 1332 |
| | T_{ds}A_{ds}GₖₛAₖₛAₖ | | | | | |
| 570561 | Gₖₛ^{m}CₖₛAₖₛG_{ds}T_{ds}G_{ds}G_{ds}^{m}C_{ds}^{m}C_{ds}^{m}C_{ds}^{m} | 17.5 | 4654 | 4669 | 866 | 1333 |
| | C_{ds}G_{ds}T_{ds}TₖₛAₖₛGₖ | | | | | |
| 570562 | AₖₛGₖₛGₖₛ^{m}C_{ds}A_{ds}G_{ds}T_{ds}G_{ds}G_{ds}^{m}C_{ds}^{m}C_{ds} | 27.9 | 4656 | 4671 | 867 | 1334 |
| | ^{m}C_{ds}^{m}C_{ds}GₖₛTₖₛTₖ | | | | | |
| 570563 | ^{m}CₖₛTₖₛAₖₛG_{ds}G_{ds}^{m}C_{ds}A_{ds}G_{ds}T_{ds}G_{ds}G_{ds}^{m} | 31.3 | 4658 | 4673 | 868 | 1335 |
| | C_{ds}^{m}C_{ds}^{m}Cₖₛ^{m}CₖₛGₖ | | | | | |
| 570564 | ^{m}Cₖₛ^{m}Cₖₛ^{m}CₖₛT_{ds}A_{ds}G_{ds}G_{ds}^{m}C_{ds}A_{ds}G_{ds}T_{ds} | 23.8 | 4660 | 4675 | 869 | 1336 |
| | G_{ds}G_{ds}^{m}Cₖₛ^{m}Cₖₛ^{m}Cₖ | | | | | |
| 570565 | AₖₛGₖₛGₖₛT_{ds}^{m}C_{ds}^{m}C_{ds}^{m}C_{ds}A_{ds}G_{ds}A_{ds}^{m}C_{ds} | 17.2 | 4678 | 4693 | 870 | 1337 |
| | A_{ds}^{m}C_{ds}Tₖₛ^{m}Cₖₛ^{m}Cₖ | | | | | |
| 570566 | AₖₛTₖₛAₖₛG_{ds}G_{ds}T_{ds}^{m}C_{ds}^{m}C_{ds}^{m}C_{ds}A_{ds}G_{ds} | 33.1 | 4680 | 4695 | 871 | 1338 |
| | A_{ds}^{m}C_{ds}Aₖₛ^{m}CₖₛTₖ | | | | | |
| 570567 | GₖₛAₖₛAₖₛT_{ds}A_{ds}G_{ds}G_{ds}T_{ds}^{m}C_{ds}^{m}C_{ds}^{m}C_{ds} | 51.8 | 4682 | 4697 | 872 | 1339 |
| | A_{ds}G_{ds}Aₖₛ^{m}CₖₛAₖ | | | | | |
| 570568 | GₖₛAₖₛGₖₛA_{ds}A_{ds}T_{ds}A_{ds}G_{ds}G_{ds}T_{ds}^{m}C_{ds}^{m} | 20.3 | 4684 | 4699 | 873 | 1340 |
| | C_{ds}^{m}C_{ds}AₖₛGₖₛAₖ | | | | | |
| 570569 | ^{m}CₖₛAₖₛGₖₛA_{ds}G_{ds}A_{ds}A_{ds}T_{ds}A_{ds}G_{ds}G_{ds}T_{ds} | 19 | 4686 | 4701 | 874 | 1341 |
| | ^{m}C_{ds}^{m}Cₖₛ^{m}CₖₛAk | | | | | |

TABLE 18
Inhibition of human DMPK RNA transcript in HepG2 cell stargeting SEQ ID NO: 2

| | | | Start | Stop | | |
|---|---|---|---|---|---|---|
| | | | Site on | Site on | | Modified |
| ISIS | | % Target | Seq | Seq | Unmodified | Seq ID |
| No. | Sequence | Expression | ID: 2 | ID: 2 | Seq ID No. | No. |
| UTC | N/A | 100 | N/A | N/A | | |
| 445569 | ^{m}CₑₛGₑₛGₑₛAₑₛGₑₛ^{m}C_{ds}G_{ds}G_{ds}T_{ds}T_{ds}G_{ds}T_{ds} | 33.8 | 13226 | 13245 | 24 | 1443 |
| | G_{ds}A_{ds}A_{ds}^{m}CₑₛTₑₛGₑₛGₑₛ^{m}Cₑ | | | | | |
| 486178 | Aₖₛ^{m}CₖₛAₖₛA_{ds}T_{ds}A_{ds}A_{ds}A_{ds}T_{ds}A_{ds}^{m}C_{ds}^{m} | 24.4 | 13836 | 13851 | 23 | 881 |
| | C_{ds}G_{ds}AₖₛGₖₛGₖ | | | | | |
| 570647 | Gₖₛ^{m}CₖₛTₖₛT_{ds}G_{ds}G_{ds}G_{ds}^{m}C_{ds}^{m}C_{ds}^{m}C_{ds}A_{ds} | 60.6 | 5718 | 5733 | 645 | 1111 |
| | ^{m}C_{ds}^{m}C_{ds}^{m}Cₖₛ^{m}CₖₛTₖ | | | | | |
| 570648 | AₖₛGₖₛGₖₛ^{m}C_{ds}T_{ds}T_{ds}G_{ds}G_{ds}G_{ds}^{m}C_{ds}^{m}C_{ds}^{m} | 82 | 5720 | 5735 | 646 | 1112 |
| | C_{ds}A_{ds}^{m}Cₖₛ^{m}Cₖₛ^{m}Cₖ | | | | | |
| 570649 | ^{m}CₖₛGₖₛAₖₛG_{ds}G_{ds}^{m}C_{ds}T_{ds}T_{ds}G_{ds}G_{ds}G_{ds}^{m} | 133.4 | 5722 | 5737 | 647 | 1113 |
| | C_{ds}^{m}C_{ds}^{m}CₖₛAₖₛ^{m}Cₖ | | | | | |
| 570650 | AₖₛGₖₛ^{m}CₖₛG_{ds}A_{ds}G_{ds}G_{ds}^{m}C_{ds}T_{ds}T_{ds}G_{ds}G_{ds} | 54.1 | 5724 | 5739 | 648 | 1114 |
| | G_{ds}^{m}Cₖₛ^{m}Cₖₛ^{m}Cₖ | | | | | |
| 570651 | AₖₛGₖₛAₖₛG_{ds}^{m}C_{ds}G_{ds}A_{ds}G_{ds}G_{ds}^{m}C_{ds}T_{ds}T_{ds} | 88.5 | 5726 | 5741 | 649 | 1115 |
| | G_{ds}GₖₛGₖₛ^{m}Cₖ | | | | | |
| 570652 | Gₖₛ^{m}CₖₛAₖₛG_{ds}A_{ds}G_{ds}^{m}C_{ds}G_{ds}A_{ds}G_{ds}G_{ds}^{m} | 162.9 | 5728 | 5743 | 650 | 1116 |
| | C_{ds}T_{ds}TₖₛGₖₛGₖ | | | | | |
| 570653 | GₖₛAₖₛGₖₛ^{m}C_{ds}A_{ds}G_{ds}A_{ds}G_{ds}^{m}C_{ds}G_{ds}A_{ds} | 130 | 5730 | 5745 | 651 | 1117 |
| | G_{ds}G_{ds}^{m}CₖₛTₖₛTₖ | | | | | |
| 570654 | AₖₛAₖₛAₖₛG_{ds}G_{ds}A_{ds}G_{ds}^{m}C_{ds}A_{ds}G_{ds}A_{ds}G_{ds} | 66.5 | 5734 | 5749 | 652 | 1118 |
| | ^{m}C_{ds}GₖₛAₖₛGₖ | | | | | |
| 570655 | ^{m}CₖₛAₖₛAₖₛA_{ds}A_{ds}G_{ds}G_{ds}A_{ds}G_{ds}^{m}C_{ds}A_{ds} | 79 | 5736 | 5751 | 653 | 1119 |
| | G_{ds}A_{ds}Gₖₛ^{m}CₖₛGₖ | | | | | |
| 570656 | TₖₛGₖₛGₖₛA_{ds}^{m}C_{ds}^{m}C_{ds}A_{ds}A_{ds}A_{ds}A_{ds}G_{ds} | 57.4 | 5741 | 5756 | 654 | 1120 |
| | G_{ds}A_{ds}Gₖₛ^{m}CₖₛAₖ | | | | | |
| 570657 | ^{m}Cₖₛ^{m}CₖₛTₖₛG_{ds}G_{ds}A_{ds}^{m}C_{ds}^{m}C_{ds}A_{ds}A_{ds}A_{ds} | 129.2 | 5743 | 5758 | 655 | 1121 |
| | A_{ds}G_{ds}GₖₛAₖₛGₖ | | | | | |
| 570658 | ^{m}CₖₛAₖₛ^{m}Cₖₛ^{m}C_{ds}T_{ds}G_{ds}G_{ds}A_{ds}^{m}C_{ds}^{m}C_{ds} | 66.3 | 5745 | 5760 | 656 | 1122 |
| | A_{ds}A_{ds}A_{ds}AₖₛGₖₛGₖ | | | | | |
| 570659 | ^{m}CₖₛGₖₛ^{m}CₖₛA_{ds}^{m}C_{ds}^{m}C_{ds}T_{ds}G_{ds}G_{ds}A_{ds}^{m} | 58.7 | 5747 | 5762 | 657 | 1123 |
| | C_{ds}^{m}C_{ds}A_{ds}AₖₛAₖₛAₖ | | | | | |
| 570660 | GₖₛAₖₛ^{m}Cₖₛ^{m}C_{ds}G_{ds}^{m}C_{ds}A_{ds}^{m}C_{ds}^{m}C_{ds}T_{ds} | 55.4 | 5750 | 5765 | 658 | 1124 |
| | G_{ds}G_{ds}A_{ds}^{m}Cₖₛ^{m}CₖₛAₖ | | | | | |
| 570661 | Aₖₛ^{m}Cₖₛ^{m}CₖₛT_{ds}T_{ds}G_{ds}T_{ds}A_{ds}G_{ds}T_{ds}G_{ds}G_{ds} | 45.4 | 5951 | 5966 | 659 | 1125 |
| | A_{ds}^{m}CₖₛGₖₛAₖ | | | | | |
| 570662 | Tₖₛ^{m}CₖₛAₖₛ^{m}C_{ds}^{m}C_{ds}T_{ds}T_{ds}G_{ds}T_{ds}A_{ds}G_{ds} | 63.5 | 5953 | 5968 | 660 | 1126 |
| | T_{ds}G_{ds}GₖₛAₖₛ^{m}Cₖ | | | | | |
| 570663 | Gₖₛ^{m}CₖₛTₖₛ^{m}C_{ds}A_{ds}^{m}C_{ds}^{m}C_{ds}T_{ds}T_{ds}G_{ds}T_{ds} | 56.6 | 5955 | 5970 | 661 | 1127 |
| | A_{ds}G_{ds}TₖₛGₖₛGₖ | | | | | |
| 570664 | GₖₛGₖₛAₖₛG_{ds}A_{ds}G_{ds}G_{ds}A_{ds}G_{ds}G_{ds}^{m}C_{ds}G_{ds} | 125.6 | 6015 | 6030 | 662 | 1111 |
| | A_{ds}TₖₛAₖₛGₖ | | | | | |
| 570665 | AₖₛGₖₛGₖₛG_{ds}A_{ds}G_{ds}A_{ds}G_{ds}G_{ds}A_{ds}G_{ds}G_{ds}^{m} | 64.2 | 6017 | 6032 | 663 | 1112 |
| | C_{ds}GₖₛAₖₛTₖ | | | | | |
| 570666 | ^{m}CₖₛTₖₛ^{m}Cₖₛ^{m}C_{ds}T_{ds}G_{ds}^{m}C_{ds}T_{ds}^{m}C_{ds}A_{ds}G_{ds} | 59 | 6028 | 6043 | 664 | 1113 |
| | A_{ds}G_{ds}GₖₛGₖₛAₖ | | | | | |
| 570667 | GₖₛTₖₛGₖₛ^{m}C_{ds}T_{ds}^{m}C_{ds}^{m}C_{ds}T_{ds}G_{ds}^{m}C_{ds}T_{ds} | 82.3 | 6031 | 6046 | 665 | 1114 |
| | ^{m}C_{ds}A_{ds}GₖₛAₖₛGₖ | | | | | |
| 570668 | AₖₛGₖₛGₖₛT_{ds}G_{ds}^{m}C_{ds}T_{ds}^{m}C_{ds}^{m}C_{ds}T_{ds}G_{ds}^{m} | 96.2 | 6033 | 6048 | 666 | 1115 |
| | C_{ds}T_{ds}^{m}CₖₛAₖₛGₖ | | | | | |
| 570669 | AₖₛGₖₛAₖₛG_{ds}G_{ds}T_{ds}G_{ds}^{m}C_{ds}T_{ds}^{m}C_{ds}^{m}C_{ds} | 26.2 | 6035 | 6050 | 667 | 1116 |
| | T_{ds}sG_{ds}^{m}CₖₛTₖₛ^{m}Cₖ | | | | | |
| 570670 | AₖₛGₖₛAₖₛG_{ds}A_{ds}G_{ds}G_{ds}T_{ds}G_{ds}^{m}C_{ds}T_{ds}^{m}C_{ds} | 18.2 | 6037 | 6052 | 668 | 1117 |
| | ^{m}C_{ds}TₖₛGₖₛ^{m}Cₖ | | | | | |
| 570671 | Aₖₛ^{m}Cₖₛ^{m}Cₖₛ^{m}C_{ds}^{m}C_{ds}G_{ds}^{m}C_{ds}^{m}C_{ds}^{m}C_{ds}^{m}C_{ds} | 29.2 | 6291 | 6306 | 669 | 1118 |
| | ^{m}C_{ds}G_{ds}^{m}C_{ds}Tₖₛ^{m}CₖₛAₖ | | | | | |
| 570672 | ^{m}CₖₛTₖₛAₖₛ^{m}C_{ds}^{m}C_{ds}^{m}C_{ds}^{m}C_{ds}G_{ds}^{m}C_{ds}^{m}C_{ds} | 50.3 | 6293 | 6308 | 670 | 1119 |
| | ^{m}C_{ds}^{m}C_{ds}^{m}C_{ds}Gₖₛ^{m}CₖₛTₖ | | | | | |
| 570673 | Aₖₛ^{m}Cₖₛ^{m}CₖₛT_{ds}A_{ds}^{m}C_{ds}^{m}C_{ds}^{m}C_{ds}^{m}C_{ds}G_{ds}^{m} | 26.8 | 6295 | 6310 | 671 | 1120 |
| | C_{ds}^{m}C_{ds}^{m}C_{ds}^{m}Cₖₛ^{m}CₖₛGₖ | | | | | |
| 570674 | GₖₛTₖₛAₖₛ^{m}C_{ds}^{m}C_{ds}T_{ds}A_{ds}^{m}C_{ds}^{m}C_{ds}^{m}C_{ds}^{m} | 40.8 | 6297 | 6312 | 672 | 1121 |
| | C_{ds}G_{ds}^{m}C_{ds}^{m}Cₖₛ^{m}Cₖₛ^{m}Cₖ | | | | | |
| 570675 | AₖₛGₖₛGₖₛT_{ds}A_{ds}^{m}C_{ds}^{m}C_{ds}T_{ds}A_{ds}^{m}C_{ds}^{m}C_{ds} | 56.1 | 6299 | 6314 | 673 | 1122 |
| | ^{m}C_{ds}^{m}C_{ds}Gₖₛ^{m}Cₖₛ^{m}Cₖ | | | | | |
| 570676 | GₖₛGₖₛGₖₛA_{ds}G_{ds}G_{ds}T_{ds}T_{ds}^{m}C_{ds}^{m}C_{ds}^{m}C_{ds} | 95 | 6329 | 6344 | 674 | 1123 |
| | G_{ds}^{m}C_{ds}AₖₛGₖₛ^{m}Cₖ | | | | | |
| 570677 | GₖₛTₖₛ^{m}Cₖₛ^{m}C_{ds}T_{ds}T_{ds}A_{ds}^{m}C_{ds}T_{ds}^{m}C_{ds}^{m}C_{ds} | 23 | 6360 | 6375 | 675 | 1124 |
| | A_{ds}A_{ds}^{m}CₖₛTₖₛTₖ | | | | | |
| 570678 | ^{m}CₖₛTₖₛGₖₛT_{ds}^{m}C_{ds}^{m}C_{ds}T_{ds}T_{ds}A_{ds}^{m}C_{ds}T_{ds}^{m} | 23.4 | 6362 | 6377 | 676 | 1125 |
| | C_{ds}^{m}C_{ds}AₖₛAₖₛ^{m}Cₖ | | | | | |
| 570679 | ^{m}CₖₛAₖₛ^{m}CₖₛT_{ds}G_{ds}T_{ds}^{m}C_{ds}^{m}C_{ds}T_{ds}T_{ds}A_{ds} | 7.4 | 6364 | 6379 | 677 | 1126 |
| | ^{m}C_{ds}T_{ds}^{m}Cₖₛ^{m}CₖₛAₖ | | | | | |
| 570680 | GₖₛGₖₛ^{m}CₖₛA_{ds}^{m}C_{ds}T_{ds}G_{ds}T_{ds}^{m}C_{ds}^{m}C_{ds}T_{ds} | 20.6 | 6366 | 6381 | 678 | 1127 |
| | T_{ds}A_{ds}^{m}CₖₛTₖₛ^{m}Cₖ | | | | | |
| 570681 | TₖₛAₖₛGₖₛG_{ds}^{m}C_{ds}A_{ds}^{m}C_{ds}T_{ds}G_{ds}T_{ds}^{m}C_{ds}^{m} | 29 | 6368 | 6383 | 679 | 1145 |
| | C_{ds}T_{ds}TₖₛAₖₛ^{m}Cₖ | | | | | |
| 570682 | GₖₛGₖₛTₖₛA_{ds}G_{ds}G_{ds}^{m}C_{ds}A_{ds}^{m}C_{ds}T_{ds}G_{ds}T_{ds} | 10.5 | 6370 | 6385 | 680 | 1146 |
| | ^{m}C_{ds}^{m}CₖₛTₖₛTₖ | | | | | |
| 570683 | GₖₛTₖₛ^{m}CₖₛA_{ds}^{m}C_{ds}T_{ds}G_{ds}^{m}C_{ds}T_{ds}G_{ds}G_{ds} | 23 | 6445 | 6460 | 681 | 1147 |
| | G_{ds}T_{ds}^{m}Cₖₛ^{m}CₖₛTₖ | | | | | |
| 570684 | GₖₛGₖₛTₖₛ^{m}C_{ds}A_{ds}^{m}C_{ds}T_{ds}G_{ds}^{m}C_{ds}T_{ds}G_{ds} | 22.5 | 6446 | 6461 | 433 | 1148 |
| | G_{ds}G_{ds}Tₖₛ^{m}Cₖₛ^{m}Cₖ | | | | | |
| 570685 | AₖₛGₖₛGₖₛT_{ds}^{m}C_{ds}A_{ds}^{m}C_{ds}T_{ds}G_{ds}^{m}C_{ds}T_{ds} | 10.2 | 6447 | 6462 | 682 | 1149 |
| | G_{ds}G_{ds}GₖₛTₖₛ^{m}Cₖ | | | | | |
| 570686 | ^{m}CₖₛTₖₛAₖₛG_{ds}G_{ds}T_{ds}^{m}C_{ds}A_{ds}^{m}C_{ds}T_{ds}G_{ds}^{m} | 11.1 | 6449 | 6464 | 683 | 1150 |
| | C_{ds}T_{ds}GₖₛGₖₛGₖ | | | | | |
| 570687 | GₖₛTₖₛ^{m}CₖₛT_{ds}A_{ds}G_{ds}G_{ds}T_{ds}^{m}C_{ds}A_{ds}^{m}C_{ds} | 11.7 | 6451 | 6466 | 684 | 1151 |
| | T_{ds}G_{ds}^{m}CₖₛTₖₛGₖ | | | | | |
| 570688 | AₖₛAₖₛGₖₛT_{ds}^{m}C_{ds}T_{ds}A_{ds}G_{ds}G_{ds}T_{ds}^{m}C_{ds}A_{ds} | 14.6 | 6453 | 6468 | 685 | 1152 |
| | ^{m}C_{ds}TₖₛGₖₛ^{m}Cₖ | | | | | |
| 570689 | Gₖₛ^{m}CₖₛAₖₛ^{m}C_{ds}T_{ds}^{m}C_{ds}^{m}C_{ds}A_{ds}T_{ds}T_{ds}G_{ds} | 10.1 | 6530 | 6545 | 686 | 1153 |
| | T_{ds}^{m}C_{ds}Tₖₛ^{m}CₖₛAₖ | | | | | |
| 570690 | ^{m}CₖₛTₖₛGₖₛ^{m}C_{ds}A_{ds}^{m}C_{ds}T_{ds}^{m}C_{ds}^{m}C_{ds}A_{ds}T_{ds} | 35.4 | 6532 | 6547 | 687 | 1154 |
| | T_{ds}G_{ds}Tₖₛ^{m}CₖₛTₖ | | | | | |
| 570691 | ^{m}Cₖₛ^{m}Cₖₛ^{m}CₖₛT_{ds}G_{ds}^{m}C_{ds}A_{ds}^{m}C_{ds}T_{ds}^{m}C_{ds}^{m} | 33.6 | 6534 | 6549 | 688 | 1155 |
| | C_{ds}A_{ds}T_{ds}TₖₛGₖₛTₖ | | | | | |
| 570692 | ^{m}Cₖₛ^{m}Cₖₛ^{m}Cₖₛ^{m}C_{ds}^{m}C_{ds}T_{ds}G_{ds}^{m}C_{ds}A_{ds}^{m}C_{ds} | 77.3 | 6536 | 6551 | 689 | 1156 |
| | T_{ds}^{m}C_{ds}^{m}C_{ds}AₖₛTₖₛTₖ | | | | | |
| 570693 | ^{m}CₖₛTₖₛTₖₛG_{ds}^{m}C_{ds}T_{ds}G_{ds}A_{ds}G_{ds}T_{ds}^{m}C_{ds} | 18.9 | 6559 | 6574 | 690 | 1157 |
| | A_{ds}G_{ds}GₖₛAₖₛGₖ | | | | | |
| 570694 | Tₖₛ^{m}Cₖₛ^{m}CₖₛT_{ds}T_{ds}G_{ds}^{m}C_{ds}T_{ds}G_{ds}A_{ds}G_{ds} | 30.9 | 6561 | 6576 | 691 | 1158 |
| | T_{ds}^{m}C_{ds}AₖₛGₖₛGₖ | | | | | |
| 570695 | ^{m}CₖₛTₖₛTₖₛ^{m}C_{ds}^{m}C_{ds}T_{ds}T_{ds}G_{ds}^{m}C_{ds}T_{ds}G_{ds} | 21 | 6563 | 6578 | 692 | 1159 |
| | A_{ds}G_{ds}Tₖₛ^{m}CₖₛAₖ | | | | | |
| 570696 | Aₖₛ^{m}Cₖₛ^{m}CₖₛT_{ds}T_{ds}^{m}C_{ds}^{m}C_{ds}T_{ds}T_{ds}G_{ds}^{m}C_{ds} | 50.3 | 6565 | 6580 | 693 | 1160 |
| | T_{ds}G_{ds}AₖₛGₖₛTₖ | | | | | |
| 570697 | GₖₛGₖₛAₖₛ^{m}C_{ds}^{m}C_{ds}T_{ds}T_{ds}^{m}C_{ds}^{m}C_{ds}T_{ds}T_{ds} | 28.3 | 6567 | 6582 | 694 | 1161 |
| | G_{ds}^{m}C_{ds}TₖₛGₖₛAₖ | | | | | |
| 570698 | ^{m}CₖₛAₖₛGₖₛG_{ds}A_{ds}^{m}C_{ds}^{m}C_{ds}T_{ds}Ta_{ds}^{m}C_{ds}^{m}C_{ds} | 47.6 | 6569 | 6584 | 695 | 1162 |
| | T_{ds}T_{ds}Gₖₛ^{m}CₖₛTₖ | | | | | |
| 570699 | AₖₛGₖₛ^{m}Cₖₛ^{m}C_{ds}^{m}C_{ds}T_{ds}^{m}C_{ds}^{m}C_{ds}A_{ds}G_{ds} | 17.9 | 6576 | 6591 | 696 | 1163 |
| | G_{ds}A_{ds}^{m}C_{ds}^{m}CₖₛTₖₛTₖ | | | | | |
| 570700 | TₖₛAₖₛGₖₛ^{m}C_{ds}T_{ds}^{m}C_{ds}^{m}C_{ds}^{m}C_{ds}^{m}C_{ds}A_{ds}^{m} | 24.1 | 6594 | 6609 | 697 | 1164 |
| | C_{ds}T_{ds}^{m}C_{ds}^{m}CₖₛAₖₛGₖ | | | | | |
| 570701 | GₖₛAₖₛTₖₛA_{ds}G_{ds}^{m}C_{ds}T_{ds}^{m}C_{ds}m^{m}C_{ds}^{m}C_{ds}^{m} | 12.9 | 6596 | 6611 | 698 | 1165 |
| | C_{ds}A_{ds}^{m}C_{ds}Tₖₛ^{m}Cₖₛ^{m}Cₖ | | | | | |
| 570702 | ^{m}CₖₛAₖₛGₖₛA_{ds}T_{ds}A_{ds}G_{ds}^{m}C_{ds}T_{ds}^{m}C_{ds}^{m}C_{ds} | 24 | 6598 | 6613 | 699 | 1166 |
| | ^{m}C_{ds}^{m}C_{ds}Aₖₛ^{m}CₖₛTₖ | | | | | |
| 570703 | CₖₛTₖₛ^{m}CₖₛA_{ds}G_{ds}A_{ds}T_{ds}A_{ds}G_{ds}^{m}C_{ds}T_{ds}^{m} | 22.3 | 6600 | 6615 | 700 | 1167 |
| | C_{ds}^{m}C_{ds}^{m}Cₖₛ^{m}CₖₛAₖ | | | | | |
| 570704 | AₖₛGₖₛ^{m}CₖₛT_{ds}^{m}C_{ds}A_{ds}G_{ds}A_{ds}T_{ds}A_{ds}G_{ds}^{m} | 31.8 | 6602 | 6617 | 701 | 1168 |
| | C_{ds}T_{ds}^{m}Cₖₛ^{m}Cₖₛ^{m}Cₖ | | | | | |
| 570705 | Tₖₛ^{m}CₖₛAₖₛG_{ds}^{m}C_{ds}T_{ds}^{m}C_{ds}A_{ds}G_{ds}A_{ds}T_{ds} | 33.9 | 6604 | 6619 | 702 | 1169 |
| | A_{ds}G_{ds}^{m}CₖₛTₖₛ^{m}Cₖ | | | | | |
| 570706 | Tₖₛ^{m}CₖₛTₖₛ^{m}C_{ds}A_{ds}G_{ds}^{m}C_{ds}T_{ds}^{m}C_{ds}A_{ds}G_{ds} | 28.1 | 6606 | 6621 | 703 | 1170 |
| | A_{ds}T_{ds}AₖₛGₖₛ^{m}Cₖ | | | | | |
| 570707 | GₖₛAₖₛGₖₛT_{ds}^{m}C_{ds}^{m}C_{ds}T_{ds}^{m}C_{ds}T_{ds}^{m}C_{ds}^{m}C_{ds} | 37.2 | 6636 | 6651 | 704 | 1171 |
| | T_{ds}G_{ds}^{m}CₖₛTₖₛTₖ | | | | | |
| 570708 | GₖₛGₖₛAₖₛG_{ds}G_{ds}A_{ds}G_{ds}T_{ds}^{m}C_{ds}^{m}C_{ds}T_{ds}^{m} | 66.3 | 6640 | 6655 | 705 | 1172 |
| | C_{ds}T_{ds}^{m}Cₖₛ^{m}CₖₛTₖ | | | | | |
| 570709 | GₖₛAₖₛGₖₛG_{ds}A_{ds}G_{ds}G_{ds}A_{ds}G_{ds}T_{ds}^{m}C_{ds}^{m} | 52.7 | 6642 | 6657 | 706 | 1173 |
| | C_{ds}T_{ds}^{m}CₖₛTₖₛ^{m}Cₖ | | | | | |
| 570710 | ^{m}CₖₛAₖₛAₖₛA_{ds}A_{ds}G_{ds}G_{ds}G_{ds}^{m}C_{ds}A_{ds}^{m}C_{ds} | 31.8 | 6713 | 6728 | 707 | 1174 |
| | ^{m}C_{ds}^{m}C_{ds}AₖₛGₖₛAₖ | | | | | |
| 570711 | AₖₛGₖₛ^{m}CₖₛA_{ds}A_{ds}A_{ds}A_{ds}G_{ds}G_{ds}G_{ds}^{m}C_{ds} | 12.3 | 6715 | 6730 | 708 | 1175 |
| | A_{ds}^{m}C_{ds}^{m}Cₖₛ^{m}CₖₛAₖ | | | | | |
| 570712 | GₖₛGₖₛAₖₛT_{ds}^{m}C_{ds}^{m}C_{ds}^{m}C_{ds}^{m}C_{ds}A_{ds}G_{ds}T_{ds} | 37.1 | 6733 | 6748 | 709 | 1176 |
| | A_{ds}T_{ds}TₖₛGₖₛTₖ | | | | | |
| 570713 | ^{m}CₖₛTₖₛGₖₛG_{ds}A_{ds}T_{ds}^{m}C_{ds}^{m}C_{ds}^{m}C_{ds}^{m}C_{ds}A_{ds} | 42.4 | 6735 | 6750 | 710 | 1177 |
| | G_{ds}T_{ds}AₖₛTₖₛTₖ | | | | | |
| 570714 | TₖₛGₖₛ^{m}CₖₛT_{ds}G_{ds}G_{ds}A_{ds}T_{ds}^{m}C_{ds}^{m}C_{ds}^{m}C_{ds} | 31.4 | 6737 | 6752 | 711 | 1178 |
| | ^{m}C_{ds}A_{ds}GₖₛTₖₛAₖ | | | | | |
| 570715 | AₖₛTₖₛTₖₛ^{m}C_{ds}T_{ds}^{m}C_{ds}T_{ds}A_{ds}G_{ds}A_{ds}^{m}C_{ds} | 12.1 | 6789 | 6804 | 712 | 1179 |
| | T_{ds}G_{ds}^{m}CₖₛAₖₛAₖ | | | | | |
| 570716 | TₖₛAₖₛAₖₛT_{ds}T_{ds}^{m}C_{ds}T_{ds}^{m}C_{ds}T_{ds}A_{ds}G_{ds}A_{ds} | 9 | 6791 | 6806 | 713 | 1180 |
| | ^{m}C_{ds}TₖₛGₖₛ^{m}Cₖ | | | | | |
| 570717 | Tₖₛ^{m}CₖₛTₖₛA_{ds}A_{ds}T_{ds}T_{ds}^{m}C_{ds}T_{ds}^{m}C_{ds}T_{ds}A_{ds} | 32.1 | 6793 | 6808 | 714 | 1181 |
| | G_{ds}Aₖₛ^{m}CₖₛTₖ | | | | | |
| 570718 | Tₖₛ^{m}CₖₛTₖₛ^{m}C_{ds}T_{ds}A_{ds}A_{ds}T_{ds}T_{ds}^{m}C_{ds}T_{ds}^{m} | 71.4 | 6795 | 6810 | 715 | 1182 |
| | C_{ds}T_{ds}AₖₛGₖₛAₖ | | | | | |
| 570719 | ^{m}CₖₛTₖₛ^{m}Cₖₛ^{m}C_{ds}A_{ds}T_{ds}A_{ds}A_{ds}T_{ds}T_{ds}^{m}C_{ds} | 36.9 | 6804 | 6819 | 716 | 1183 |
| | T_{ds}^{m}C_{ds}TₖₛAₖₛAₖ | | | | | |
| 570720 | Aₖₛ^{m}CₖₛTₖₛ^{m}C_{ds}T_{ds}^{m}C_{ds}^{m}C_{ds}A_{ds}T_{ds}A_{ds}A_{ds} | 17.1 | 6807 | 6822 | 717 | 1184 |
| | T_{ds}T_{ds}^{m}CₖₛTₖₛ^{m}Cₖ | | | | | |
| 570721 | Aₖₛ^{m}CₖₛAₖₛ^{m}C_{ds}T_{ds}^{m}C_{ds}T_{ds}^{m}C_{ds}^{m}C_{ds}A_{ds}T_{ds} | 23.7 | 6809 | 6824 | 718 | 1185 |
| | A_{ds}A_{ds}TₖₛTₖₛ^{m}Cₖ | | | | | |
| 570722 | ^{m}Cₖₛ^{m}CₖₛAₖₛ^{m}C_{ds}A_{ds}^{m}C_{ds}T_{ds}^{m}C_{ds}T_{ds}^{m}C_{ds}^{m} | 34.4 | 6811 | 6826 | 719 | 1186 |
| | C_{ds}A_{ds}T_{ds}AₖₛAₖₛTₖ | | | | | |
| 570723 | TₖₛGₖₛ^{m}Cₖₛ^{m}C_{ds}A_{ds}^{m}C_{ds}A_{ds}^{m}C_{ds}T_{ds}^{m}C_{ds}T_{ds} | 38.7 | 6813 | 6828 | 720 | 1187 |
| | ^{m}C_{ds}^{m}C_{ds}AₖₛTₖₛAk | | | | | |

### Example 10: Dose Response Studies with Antisense Oligonucleotides Targeting Human Dystrophia Myotonica-Protein Kinase (DMPK) in HepG2 Cells

[0679] Antisense oligonucleotides targeted to a human DMPK nucleic acid were tested for their effect on human DMPK RNA transcript in vitro. Cultured HepG2 cells at a density of 20,000 cells per well were transfected using electroporation with 61.7 nM, 185.2 nM, 555.6 nM, 1666.7 nM, 5000.0 nM, and 15000.0 nM concentrations of each antisense oligonucleotide. After approximately 24 hours, RNA was isolated from the cells and DMPK RNA transcript levels were measured by quantitative real-time PCR using primer probe set RTS3164 (forward sequence AGCCTGAGCCGGGAGATG, designated herein as SEQ ID NO: 20; reverse sequence GCGTAGTTGACTGGCGAAGTT, designated herein as SEQ ID NO: 21; probe sequence AGGCCATCCGCACGGACAACCX, designated herein as SEQ ID NO: 22). Human DMPK RNA transcript levels were adjusted according to total RNA content, as measured by RIBOGREEN®. Results are presented as percent expression of human DMPK, relative to untreated control (UTC) cells. For example, if the UTC is 100 and a dose of 5000 nM of ISIS No. 445569 yields a % Expression of human DMPK of 35 then the 5000 nM dose of ISIS reduced expression of human DMPK by 65% relative to the UTC. The half maximal inhibitory concentration (IC₅₀) of each oligonucleotide is presented in the table below and was calculated by plotting the concentrations of oligonucleotides used versus the percent inhibition of human DMPK mRNA expression achieved at each concentration, and noting the concentration of oligonucleotide at which 50% inhibition of human DMPK mlRNA expression was achieved compared to the control. The results are presented in Table 19.

[0680] The tested antisense oligonucleotide sequences demonstrated dose-dependent inhibition of human DMPK mRNA levels under the conditions specified above.

TABLE 19
Dose response studies for with antisense oligonucleotides
targeting hDMPK in HepG2 Cells

| ISIS | Dose | % Expression | |
|---|---|---|---|
| No. | (nM) | of human DMPK | IC₅₀ |
| UTC | ND | 100 | ND |
| 445569 | 61.7 | 115.3 | 2.3 |
| | 185.2 | 87.9 | |
| | 555.6 | 69.0 | |
| | 1666.7 | 57.2 | |
| | 5000.0 | 35.0 | |
| | 15000.0 | 22.6 | |
| 512497 | 61.7 | 108.6 | 2 |
| | 185.2 | 98.4 | |
| | 555.6 | 77.9 | |
| | 1666.7 | 57.2 | |
| | 5000.0 | 28.0 | |
| | 15000.0 | 12.8 | |
| 486178 | 61.7 | 88.2 | 0.7 |
| | 185.2 | 67.1 | |
| | 555.6 | 49.4 | |
| | 1666.7 | 32.8 | |
| | 5000.0 | 26.7 | |
| | 15000.0 | 11.8 | |
| 569473 | 61.7 | 107.9 | 0.6 |
| | 185.2 | 66.5 | |
| | 555.6 | 33.6 | |
| | 1666.7 | 23.5 | |
| | 5000.0 | 12.8 | |
| | 15000.0 | 9.2 | |
| 570808 | 61.7 | 77.2 | 0.2 |
| | 185.2 | 52.7 | |
| | 555.6 | 20.6 | |
| | 1666.7 | 8.1 | |
| | 5000.0 | 7.2 | |
| | 15000.0 | 5.4 | |
| 594292 | 61.7 | 96.2 | 5.5 |
| | 185.2 | 99.6 | |
| | 555.6 | 80.0 | |
| | 1666.7 | 59.0 | |
| | 5000.0 | 45.5 | |
| | 15000.0 | 42.8 | |
| 594300 | 61.7 | 101.7 | >15 |
| | 185.2 | 104.3 | |
| | 555.6 | 101.6 | |
| | 1666.7 | 93.6 | |
| | 5000.0 | 74.9 | |
| | 15000.0 | 66.8 | |
| 598768 | 61.7 | 95.5 | 1.2 |
| | 185.2 | 83.6 | |
| | 555.6 | 70.6 | |
| | 1666.7 | 40.7 | |
| | 5000.0 | 22.2 | |
| | 15000.0 | 7.3 | |
| 598769 | 61.7 | 103.9 | 1.9 |
| | 185.2 | 105.3 | |
| | 555.6 | 76.1 | |
| | 1666.7 | 50.4 | |
| | 5000.0 | 29.8 | |
| | 15000.0 | 12.1 | |
| 598777 | 61.7 | 96.4 | 0.9 |
| | 185.2 | 69.4 | |
| | 555.6 | 41.8 | |
| | 1666.7 | 42.8 | |
| | 5000.0 | 16.4 | |
| | 15000.0 | 27.1 | |

### Example 11: Dose Response Studies with Antisense Oligonucleotides Targeting Human Dystrophia Myotonica-Protein Kinase (hDMPK) in Steinert DM1 Myoblast Cells

[0681] Antisense oligonucleotides targeted to a human DMPK nucleic acid were tested for their effect on human DMPK RNA transcript in vitro. Cultured Steinert DM1 myoblast cells at a density of 20,000 cells per well were transfected using electroporation with 61.7 nM, 185.2 nM, 555.6 nM, 1666.7 nM, 5000.0 nM, and 15000.0 nM concentrations of each antisense oligonucleotide. After approximately 24 hours, RNA was isolated from the cells and DMPK RNA transcript levels were measured by quantitative real-time PCR using primer probe set RTS3164 described above. Human DMPK RNA transcript levels were adjusted according to total RNA content, as measured by RIBOGREEN®. Results are presented as percent (%) expression of human DMPK, relative to untreated control (UTC) cells. The half maximal inhibitory concentration (IC₅₀) of each oligonucleotide is presented in the table below and was calculated by plotting the concentrations of oligonucleotides used versus the percent inhibition of human DMPK mRNA expression achieved at each concentration, and noting the concentration of oligonucleotide at which 50% inhibition of human DMPK mRNA expression was achieved compared to the control. The results are presented in Table 20.

[0682] The tested antisense oligonucleotide sequences demonstrated dose-dependent inhibition of human DMPK mRNA levels under the conditions specified above.

TABLE 20
Dose response studies for with antisense oligonucleotides
targeting hDMPK in Steinert DM1 Cells

| ISIS | Dose | % Expression | |
|---|---|---|---|
| No. | (nM) | of human DMPK | IC₅₀ |
| UTC | ND | 100 | ND |
| 445569 | 61.7 | 58.3 | 0.4 |
| | 185.2 | 56.7 | |
| | 555.6 | 58.5 | |
| | 1666.7 | 40.9 | |
| | 5000.0 | 26.0 | |
| | 15000.0 | 23.5 | |
| 512497 | 61.7 | 78.1 | 5.1 |
| | 185.2 | 77.5 | |
| | 555.6 | 98.8 | |
| | 1666.7 | 71.2 | |
| | 5000.0 | 51.3 | |
| | 15000.0 | 22.8 | |
| 486178 | 61.7 | 78.0 | 0.5 |
| | 185.2 | 61.3 | |
| | 555.6 | 43.3 | |
| | 1666.7 | 27.4 | |
| | 5000.0 | 24.6 | |
| | 15000.0 | 16.9 | |
| 569473 | 61.7 | 83.3 | 0.6 |
| | 185.2 | 54.8 | |
| | 555.6 | 64.5 | |
| | 1666.7 | 26.1 | |
| | 5000.0 | 19.4 | |
| | 15000.0 | 15.4 | |
| 570808 | 61.7 | 103.6 | 0.9 |
| | 185.2 | 77.8 | |
| | 555.6 | 46.7 | |
| | 1666.7 | 25.2 | |
| | 5000.0 | 20.8 | |
| | 15000.0 | 19.3 | |
| 594292 | 61.7 | 100.1 | 5.6 |
| | 185.2 | 109.7 | |
| | 555.6 | 72.6 | |
| | 1666.7 | 66.2 | |
| | 5000.0 | 39.5 | |
| | 15000.0 | 45.7 | |
| 594300 | 61.7 | 96.2 | 5.6 |
| | 185.2 | 87.1 | |
| | 555.6 | 70.3 | |
| | 1666.7 | 66.4 | |
| | 5000.0 | 58.1 | |
| | 15000.0 | 33.2 | |
| 598768 | 61.7 | 77.0 | 0.7 |
| | 185.2 | 62.9 | |
| | 555.6 | 62.0 | |
| | 1666.7 | 35.6 | |
| | 5000.0 | 24.5 | |
| | 15000.0 | 21.0 | |
| 598769 | 61.7 | 70.3 | 0.4 |
| | 185.2 | 49.2 | |
| | 555.6 | 55.3 | |
| | 1666.7 | 33.2 | |
| | 5000.0 | 27.1 | |
| | 15000.0 | 13.4 | |
| 598777 | 61.7 | 87.7 | 1 |
| | 185.2 | 61.7 | |
| | 555.6 | 57.3 | |
| | 1666.7 | 37.9 | |
| | 5000.0 | 30.0 | |
| | 15000.0 | 29.7 | |

### Example 12: Dose Response Studies with Antisense Oligonucleotides Targeting Rhesus Monkey Dystrophia Myotonica-Protein Kinase (DMPK) in Cynomolgus Monkey Primary Hepatocytes

[0683] Antisense oligonucleotides targeted to a rhesus monkey DMPK nucleic acid were tested for their effect on rhesus monkey DMPK RNA transcript in vitro. Cultured cynomolgus monkey primary hepatocytes cells at a density of 20,000 cells per well were transfected using electroporation with 61.7 nM, 185.2 nM, 555.6 nM, 1666.7 nM, 5000.0 nM, and 15000.0 nM concentrations of each antisense oligonucleotide. After approximately 24 hours, RNA was isolated from the cells and DMPK RNA transcript levels were measured by quantitative real-time PCR using primer probe set RTS3164 described above. Rhesus monkey DMPK RNA transcript levels were adjusted according to total RNA content, as measured by RIBOGREEN®. Results are presented as percent (0) expression of rhesus monkey DMPK, relative to untreated control (UTC) cells. The half maximal inhibitory concentration (IC₅₀) of each oligonucleotide is presented in the table below and was calculated by plotting the concentrations of oligonucleotides used versus the percent inhibition of rhesus monkey DMPK mRNA expression achieved at each concentration, and noting the concentration of oligonucleotide at which 50% inhibition of rhesus monkey DMPK mRNA expression was achieved compared to the control.

[0684] The tested antisense oligonucleotide sequences demonstrated dose-dependent inhibition of rhesus monkey DMPK mRNA levels under the conditions specified above.

TABLE 21
Dose response studies for with antisense oligonucleotides targeting
rhesus monkey DMPK in cynomolgus monkey primary hepatocytes

| ISIS | Dose | % Expression | |
|---|---|---|---|
| No. | (nM) | of human DMPK | IC₅₀ |
| UTC | ND | 100 | ND |
| 445569 | 61.7 | 79.7 | 1.4 |
| | 185.2 | 41.1 | |
| | 555.6 | 58.1 | |
| | 1666.7 | 33.5 | |
| | 5000.0 | 46.9 | |
| | 15000.0 | 50.0 | |
| 512497 | 61.7 | 123.4 | 1.5 |
| | 185.2 | 63.7 | |
| | 555.6 | 44.8 | |
| | 1666.7 | 34.1 | |
| | 5000.0 | 51.2 | |
| | 15000.0 | 23.5 | |
| 486178 | 61.7 | 51.1 | <.06 |
| | 185.2 | 30.6 | |
| | 555.6 | 22.0 | |
| | 1666.7 | 23.5 | |
| | 5000.0 | 9.8 | |
| | 15000.0 | 19.2 | |
| 569473 | 61.7 | 82.1 | .2 |
| | 185.2 | 39.4 | |
| | 555.6 | 17.7 | |
| | 1666.7 | 28.5 | |
| | 5000.0 | 20.0 | |
| | 15000.0 | 15.6 | |
| 570808 | 61.7 | 74.6 | 0.1 |
| | 185.2 | 27.6 | |
| | 555.6 | 16.4 | |
| | 1666.7 | 25.6 | |
| | 5000.0 | 8.8 | |
| | 15000.0 | 21.9 | |
| 594292 | 61.7 | 93.0 | >15 |
| | 185.2 | 82.1 | |
| | 555.6 | 106.0 | |
| | 1666.7 | 91.1 | |
| | 5000.0 | 62.2 | |
| | 15000.0 | 70.4 | |
| 594300 | 61.7 | 105.5 | >15 |
| | 185.2 | 91.8 | |
| | 555.6 | 114.9 | |
| | 1666.7 | 65.7 | |
| | 5000.0 | 110.2 | |
| | 15000.0 | 118.8 | |
| 598768 | 61.7 | 70.3 | 0.4 |
| | 185.2 | 57.8 | |
| | 555.6 | 58.5 | |
| | 1666.7 | 16.5 | |
| | 5000.0 | 24.0 | |
| | 15000.0 | 13.4 | |
| 598769 | 61.7 | 76.5 | 1.1 |
| | 185.2 | 65.1 | |
| | 555.6 | 64.0 | |
| | 1666.7 | 34.4 | |
| | 5000.0 | 60.9 | |
| | 15000.0 | 8.6 | |
| 598777 | 61.7 | 161.4 | 2.1 |
| | 185.2 | 51.7 | |
| | 555.6 | 47.5 | |
| | 1666.7 | 34.6 | |
| | 5000.0 | 27.8 | |
| | 15000.0 | 52.9 | |

### Example 13: In Vivo Antisense Inhibition of hDMPK in DMSXL Transgenic Mice

[0685] To test the effect of antisense inhibition for the treatment of myotonic dystrophy type 1 (DM1), an appropriate mouse model was required. The transgenic mouse model, DMSXL carrying the hDMPK gene with large expansions of over 1000 CTG repeats was generated (Huguet et al., PLOS Genetics, 2012, 8(11), e1003034-e1003043). These DMSXL mice express the mutant hDMPK allele and display muscle weakness phenotype similar to that seen in DM1 patients.

[0686] ISIS 486178 from Table 1 was selected and tested for antisense inhibition of hDMPK transcript in vivo. ISIS 445569 was included in the study for comparison.

### Treatment

[0687] DMSXL mice were maintained on a 12-hour light/dark cycle and fed ad libitum normal Purina mouse chow. Animals were acclimated for at least 7 days in the research facility before initiation of the experiment. Antisense oligonucleotides (ASOs) were prepared in PBS and sterilized by filtering through a 0.2 micron filter. ASOs were dissolved in 0.9% PBS for injection.

[0688] DMSXL mice received subcutaneous injections of ISIS 445569 at 50 mg/kg or ISIS 486178 at 25 mg/kg twice per week for 4 weeks. The control group received subcutaneous injections of PBS twice weekly for 4 weeks. Each treatment group consisted of 4 animals.

Inhibition of hDMPK mRNA Levels

[0689] Twenty four hours after the final dose, the mice were sacrificed and tissues were collected. mRNA was isolated for real-time PCR analysis of hDMPK and normalized to 18s RNA. Human primer probe set RTS3164 was used to measure mRNA levels. The results are expressed as the average percent of hDMPK mRNA levels for each treatment group, relative to PBS control.

[0690] Human primer probe set RTS3164 (forward sequence AGCCTGAGCCGGGAGATG, designated herein as SEQ ID NO: 20; reverse sequence GCGTAGTTGACTGGCGAAGTT, designated herein as SEQ ID NO: 21; probe sequence AGGCCATCCGCACGGACAACCX, designated herein as SEQ ID NO: 22).

[0691] As presented in Table 22 below, treatment with antisense oligonucleotides reduced hDMPK transcript expression. The results indicate that treatment with ISIS 445569 and 486178 resulted in reduction of hDMPK mRNA levels in DMSXL mice.

TABLE 22
Effect of antisense oligonucleotides
on hDMPK inhibition in DMSXL mice

| | | | hDMPK | |
|---|---|---|---|---|
| ISIS | Dosage | Tissue | mRNA levels | |
| No. | (mg/kg) | Type | (% PBS) | Motif/Length |
| PBS | 0 | | | |
| 486178 | 25 | Tibialis | 70.7 | kkk-d10-kkk |
| | | Anterior | | (16 mer) |
| | | Soleus | 67.3 | |
| | | Quadriceps | 73.9 | |
| | | Latissiumus | 71.0 | |
| | | grand dorsi | | |
| | | Triceps | 67.1 | |
| | | Diaphragm | 68.9 | |
| | | Heart | 30.8 | |
| | | Brain | 11.8 | |
| 445569 | 50 | Tibialis | 38.4 | e5-d10-e5 |
| | | Anterior | | (20 mer) |
| | | Soleus | 47.5 | |
| | | Quadriceps | 41.3 | |
| | | Latissiumus | 35.7 | |
| | | grand dorsi | | |
| | | Triceps | 30.5 | |
| | | Diaphragm | 44.7 | |
| | | Heart | 7.6 | |
| | | Brain | 13.1 | |

### Example 14: Effect of ASO Treatment on Muscle Strength in DMSXL Mice Targeting hDMPK

### Griptest

[0692] Mice were assessed for grip strength performance in wild-type (WT) and DMSXL forelimb using a commercial grip strength dynamometer as described in the literature ((Huguet et al., PLOS Genetics, 2012, 8(11), e1003034-e1003043).

[0693] DMSXL mice received subcutaneous injections of ISIS 486178 at 25 mg/kg or ISIS 445569 at 50 mg/kg twice per week for 4 weeks. The control DMSXL group received subcutaneous injections of PBS twice weekly for 4 weeks. Each treatment group consisted of 4 animals. The forelimb force for each treatment group and WT was measured at day 0, 30, and 60 using the griptest. The grip strength performance was determined by measuring the force difference between day 60 and day 0. Results are presented as the average forelimb force from each group.

[0694] As illustrated in Table 23, below, treatment with ASOs targeting hDMPK improved muscle strength in DMSXL mice compared to untreated control. ISIS 486178, an ASO with cEt modifications, demonstrated substantial improvement in the forelimb strength (+3.4) compared to ISIS 445569 with MOE modifications (+0.38).

TABLE 23
Effect of ASO treatment on muscle strength
in DMSXL mice targeting hDMPK

| | Forelimb force (g) | | | |
|---|---|---|---|---|
| Treatment group | Day 0 | Day 30 | Day 60 | Δ = Day 60 − Day 0 |
| Untreated control | 72.2 | 70.2 | 67.5 | −4.6 |
| ASO 486178 | 62.3 | 65.7 | 65.6 | +3.4 |
| ASO 445569 | 64.3 | 68 | 64.7 | +0.38 |
| Wild type (WT) | 75.2 | 76.5 | 78.4 | +3.2 |

### Example 15: Effect of ASO Treatment on Muscle Fiber Distribution in DMSXL Mice Targeting hDMPK

[0695] The muscle fiber distribution in DMSXL mice targeting hDMPK in the presence and absence of ISIS 445569 and 486178 was also assessed. Both ASOs were previously described in Table 1, above.

[0696] DMSXL mice received subcutaneous injections of ISIS 486178 at 25 mg/kg or ISIS 445569 at 50 mg/kg twice per week for 4 weeks. The control DMSXL group received subcutaneous injections of PBS twice weekly for 4 weeks. Each treatment group consisted of 4 animals. The muscle fiber distribution was assessed and the results are presented Table 44, below.

[0697] As illustrated, treatment with ASOs targeting hDMPK decreased the distribution of DM1 Associated Type 2c muscle fiber in the tibialis anterior (TA) of DMSXL mice compared to untreated control. The results demonstrated that normal pattern of fiber distribution in the skeletal muscles can be restored with ASO treatment. ISIS 445569 demonstrated an improvement in the muscle fiber distribution as compared to the untreated control; however ISIS 486178, an ASO with cEt modifications, demonstrated muscle fiber distribution that was more consistent with the muscle fiber distribution found in the wild-type mice.

TABLE 24
Effect of ASO treatment on muscle fiber distribution
in DMSXL mice targeting hDMPK

| | Fiber Type Distribution in TA muscle | | |
|---|---|---|---|
| Treatment group | Fiber 1 | Fiber 2a | Fiber 2c |
| Untreated control | 4% | 25% | 5.90% |
| ASO 486178 | 3.10% | 15% | 0.70% |
| ASO 445569 | 4% | 21% | 2% |
| Wild type (WT) | 3.30% | 15% | 0.00% |

### Example 16: Dose-Dependent Antisense Inhibition of hDMPK in DMSXL Transgenic Mice

[0698] The newly designed ASOs from Table 1, above, were further evaluated in a dose-response study for antisense inhibition of hDMPK transcript in vivo. ISIS 445569 was included in the study for comparison.

### Treatment

[0699] DMSXL mice were maintained on a 12-hour light/dark cycle and fed ad libitum normal Purina mouse chow. Animals were acclimated for at least 7 days in the research facility before initiation of the experiment. Antisense oligonucleotides (ASOs) were prepared in PBS and sterilized by filtering through a 0.2 micron filter. ASOs were dissolved in 0.9% PBS for injection.

[0700] DMSXL mice received subcutaneous injections of PBS or ASOs from Table 1, above, targeting hDMPK. The ASO was dosed twice per week for 4 weeks at the indicated doses in Table 25, below. The control group received subcutaneous injections of PBS twice weekly for 4 weeks. Each treatment group consisted of 4 animals.

Inhibition of hDMPK mRNA Levels

[0701] Forty eight hours after the final dose, the mice were sacrificed and tissue from the tibialis anterior muscles, quadriceps muscles (left), gastrocnemius muscles, heart and diaphragm was isolated. mRNA was isolated for real-time PCR analysis of hDMPK and normalized to RIBOGREEN®. Human primer probe set RTS3164 was used to measure mRNA levels. The results summarized in Table 25, below, were independently generated from various dose-response studies. The results are presented as the average percent of hDMPK mRNA expression levels for each treatment group, relative to PBS control.

[0702] As presented, treatment with antisense oligonucleotides reduced hDMPK transcript expression in a dose-dependent manner.

TABLE 25
Dose-dependent inhibition of hDMPK mRNA levels in DMSXL mice

| | | hDMPK mRNA levels (% PBS) | | | | |
|---|---|---|---|---|---|---|
| ISIS No. | mg/kg/wk | TA | Quad (Left) | Gastroc | Heart | Diaphragm |
| PBS | 0 | 100 | 100 | 100 | 100 | 100 |
| 445569 | 50 | 54.7 | 80.3 | 97.1 | 55.4 | 21.7 |
| | 100 | 28.3 | 42.1 | 71.3 | 48.9 | 19.7 |
| | 200 | 22.2 | 33.9 | 45.2 | 34.2 | 10.0 |
| 512497 | 50 | 23.8 | 48.9 | 52.9 | 44.4 | 35.0 |
| | 100 | 9.7 | 28.7 | 24.8 | 43.8 | 24.2 |
| | 200 | 11.4 | 22.4 | 16.4 | 42.0 | 15.2 |
| 486178 | 25 | 59.1 | 56.1 | 63.1 | 75.3 | 39.1 |
| | 50 | 33.8 | 61.9 | 58.7 | 59.2 | 32.5 |
| | 100 | 36.6 | 65.8 | 51.6 | 47.3 | 26.2 |
| 570808 | 25 | 26.3 | 41.1 | 39.8 | 44.9 | 17.3 |
| | 50 | 12.2 | 13.0 | 36.3 | 18.4 | 8.1 |
| | 100 | 6.1 | 5.4 | 7.9 | 10.2 | 3.0 |
| 594292 | 25 | 48.8 | 32.2 | 68.8 | 70.6 | 72.7 |
| | 50 | 32.0 | 30.4 | 41.1 | 85.1 | 48.3 |
| | 100 | 31.6 | 39.6 | 53.3 | 63.9 | 40.2 |
| 598768 | 25 | 16.9 | 27.1 | 27.5 | 56.3 | 26.9 |
| | 50 | 10.2 | 33.6 | 24.1 | 30.8 | 20.2 |
| | 100 | 6.8 | 22.0 | 25.5 | 22.6 | 13.1 |
| 598769 | 25 | 21.6 | 50.8 | 48.1 | 61.0 | 30.3 |
| | 50 | 12.7 | 25.1 | 42.3 | 36.4 | 16.7 |
| | 100 | 12.8 | 18.4 | 33.2 | 32.0 | 20.2 |
| 569473 | 25 | 42.0 | 21.8 | 48.9 | 51.8 | 34.8 |
| | 50 | 41.6 | 16.2 | 47.6 | 55.6 | 23.6 |
| | 100 | 31.9 | 19.2 | 31.9 | 35.6 | 20.5 |
| 594300 | 25 | 114.5 | 56.7 | 96.2 | 91.0 | 62.6 |
| | 50 | 44.3 | 22.3 | 52.8 | 69.3 | 54.7 |
| | 100 | 73.0 | 22.6 | 56.6 | 78.3 | 44.5 |
| 598777 | 25 | 49.4 | 28.8 | 76.1 | 97.1 | 58.7 |
| | 50 | 44.8 | 13.6 | 36.5 | 87.4 | 40.8 |
| | 100 | 31.8 | 10.1 | 22.5 | 86.8 | 33.6 |

TA = Tibialis Anterior;
Quad = Quadriceps;
Gastroc = Gastrocnemius

### Example 17: Six Week In Vivo Tolerability Study in CD-1 Mice

[0703] The newly designed ASOs from Table 1, above, were further evaluated in a 6 week study to assess plasma chemistry, body/organ weights and histology. Groups of CD-1 mice were administered 100 mg/kg/wk of ISIS 445569 or ISIS 512497. Further groups of CD-1 mice were administered 50 mg/kg/wk of ISIS 486178, ISIS 570808, ISIS 594292, ISIS 598768, ISIS 598769, ISIS 569473, ISIS 594300, and ISIS 598777. After six weeks and two days after each group of mice received the last dose, the mice were sacrificed and tissues were collected for analysis. For each group of mice, analysis to measure alanine transaminase levels, aspartate aminotransferase levels, blood urea nitrogen (BUN) levels, albumin levels, total bilirubin, and creatine levels was measured. Additionally, organ weights were also measured, the results of which are presented in the tables below.

TABLE 26
Plasma Chemistry in CD-1 mice

| | | | BUN | Albumin | T. Bil | Creatinine |
|---|---|---|---|---|---|---|
| ISIS No. | ALT (U/L) | AST (U/L) | (mg/dL) | (g/dL) | (mg/dL) | (mg/dL) |
| PBS | 31.75 | 60.75 | 32.73 | 2.99 | 0.23 | 0.16 |
| 486178 | 65.00 | 103.00 | 27.18 | 2.90 | 0.19 | 0.13 |
| 445569 | 162.75 | 195.25 | 29.70 | 3.38 | 0.26 | 0.14 |
| 570808 | 313.50 | 332.50 | 32.40 | 2.81 | 0.28 | 0.15 |
| 594292 | 58.75 | 133.00 | 28.15 | 2.94 | 0.21 | 0.13 |
| 598768 | 45.50 | 92.00 | 26.85 | 2.90 | 0.21 | 0.11 |
| 598769 | 69.25 | 94.25 | 32.73 | 2.89 | 0.18 | 0.13 |
| 512497 | 101.25 | 144.50 | 26.90 | 2.90 | 0.19 | 0.12 |
| 569473 | 75.75 | 137.00 | 28.98 | 3.05 | 0.26 | 0.13 |
| 594300 | 46.00 | 76.75 | 24.70 | 2.94 | 0.18 | 0.11 |
| 598777 | 186.50 | 224.25 | 24.68 | 2.97 | 0.30 | 0.11 |

TABLE 27
Body & Organ Weights in CD-1 mice

| ISIS No. | *Kidney % BW | *Liver % BW | *Spleen % BW |
|---|---|---|---|
| PBS | 1.00 | 1.00 | 1.00 |
| 486178 | 1.05 | 1.05 | 1.03 |
| 445569 | 1.07 | 1.09 | 1.23 |
| 570808 | 0.94 | 1.27 | 1.43 |
| 594292 | 1.03 | 1.03 | 1.16 |
| 598768 | 1.14 | 1.08 | 0.97 |
| 598769 | 0.97 | 1.05 | 1.04 |
| 512497 | 0.99 | 1.17 | 1.38 |
| 569473 | 1.02 | 1.01 | 1.09 |
| 594300 | 1.14 | 1.07 | 1.02 |
| 598777 | 1.05 | 1.20 | 1.01 |

*Fold change over Saline control group

### Example 18: Six Week In Vivo Tolerability Study in Sprague-Dawley Rats

[0704] The newly designed ASOs from Table 1, above, were further evaluated in a 6 week study to assess plasma chemistry, body/organ weights and histology. Groups of Sprague-Dawley rats were administered 100 mpk/wk of ISIS 445569 or ISIS 512497. Further groups of Groups of Sprague-Dawley rats were administered 50 mpk/wk of ISIS 486178, ISIS 570808, ISIS 594292, ISIS 598768, ISIS 598769, ISIS 569473, ISIS 594300, and ISIS 598777. After six weeks and two days after each group of mice received the last dose, the mice were sacrificed and tissues were collected for analysis. For each group of mice, analysis to measure alanine transaminase levels, aspartate aminotransferase levels, blood urea nitrogen (BUN) levels, albumin levels, total bilirubin, creatine levels, and urinary creatine levels was measured. Additionally, organ weights were also measured, the results of which are presented in the tables below.

TABLE 28
Plasma Chemistry & Urine Analysis in Sprague-Dawley Rats

| | ALT | AST | BUN | Total protein | T.Bil | Creatinine | Urine |
|---|---|---|---|---|---|---|---|
| ISIS No. | (U/L) | (U/L) | (mg/dl) | (mg/dl) | (mg/dl) | (mg/dl) | MTP/Creatine |
| Saline | 59.25 | 100.35 | 18.05 | 3.47 | 0.158 | 0.30 | 1.09 |
| 569473 | 101 | 198.25 | 25.9 | 2.74 | 0.195 | 0.4025 | 4.59 |
| 512497 | 211 | 240.25 | 19.32 | 3.58 | 0.17 | 0.39 | 6.18 |
| 598768 | 78.2 | 103.5 | 20.6 | 3.36 | 0.14 | 0.38 | 3.85 |
| 598769 | 84.5 | 104.5 | 18.6 | 3.52 | 0.15 | 0.34 | 3.02 |
| 570808 | 82 | 141 | 23.8 | 3.08 | 0.21 | 0.4 | 2.71 |
| 598777 | 109 | 119.5 | 21.65 | 3.79 | 0.22 | 0.37 | 2.56 |
| 445569 | 117.5 | 163.2 | 22.45 | 3.86 | 0.18 | 0.47 | 6.4 |
| 594300 | 66 | 80.75 | 17.53 | 3.59 | 0.12 | 0.29 | 4.72 |
| 486178 | 56.8 | 80.75 | 23.3 | 5.28 | 0.08 | 3.0 | 4.5 |
| 594292 | 64.5 | 80.5 | 19.62 | 3.38 | 0.098 | 0.29 | 5.17 |

TABLE 29
Plasma Chemistry & Urine Analysis in Sprague-Dawley Rats

| ISIS No. | Kidney (fold)* | Liver (fold)* | Spleen (fold)* |
|---|---|---|---|
| Saline | 1 | 1 | 1 |
| 569473 | 1.46 | 1.20 | 0.82 |
| 512497 | 1.03 | 1.22 | 1.94 |
| 598768 | 0.92 | 0.92 | 1.49 |
| 598769 | 0.93 | 1.04 | 0.98 |
| 570808 | 1.18 | 0.98 | 2.43 |
| 598777 | 1.07 | 0.93 | 2.31 |
| 445569 | 1 | 1.13 | 3.25 |
| 594300 | 1.03 | 1.04 | 1.94 |
| 486178 | 0.87 | 0.89 | 1.45 |
| 594292 | 1.08 | 1.01 | 2.04 |

*Fold change over Saline control group

### Example 19: Thirteen (13) Week In Vivo Study in Cynomolgus Monkeys

[0705] Groups of 4 cynomolgus male monkeys were administered 40 mg/kg/wk of ISIS 445569, ISIS 512497, ISIS 486178, ISIS 570808, ISIS 594292, ISIS 598768, ISIS 598769, ISIS 569473, ISIS 594300, and ISIS 598777 via subcutaneous injection. Thirteen weeks after the first dose, the animals were sacrificed and tissue analysis was performed. mRNA was isolated for real-time PCR analysis of rhesus monkey DMPK and normalized to RIBOGREEN®. Primer probe set RTS3164 (described above) was used to measure mRNA levels and the results are shown in Table 30 below. Additionally, further mRNA was isolated for real-time PCR analysis of rhesus monkey DMPK and normalized to RIBOGREEN® using primer probe set RTS4447 and the results are shown in Table 31 below. RTS4447 (forward sequence AGCCTGAGCCGGGAGATG, designated herein as SEQ ID NO: 20; reverse sequence GCGTAGTTGACTGGCAAAGTT, designated herein as SEQ ID NO: 21; probe sequence AGGCCATCCGCATGGCCAACC, designated herein as SEQ ID NO: 22).

TABLE 30
Dose-dependent inhibition of DMPK mRNA levels in
Cynomolgus Monkeys using Primer Probe Set RTS3164

| | | hDMPK mRNA levels (% PBS) | | | | | |
|---|---|---|---|---|---|---|---|
| ISIS No. | mg/kg/wk | TA | Quad (Left) | Gastroc | Kidney | Heart | Liver |
| PBS | 0 | 100 | 100 | 100 | 100 | 100 | 100 |
| 486178 | 40 | 26.1 | 30.8 | 49.3 | 55.3 | 45.8 | 44.9 |
| 445569 | 40 | 68.5 | 82.2 | 128.9 | 65.6 | 91.2 | 113.5 |
| 512497 | 40 | 60.3 | 58.7 | 66.7 | 61.9 | 74.2 | 68.1 |
| 598768 | 40 | 69.1 | 64.9 | 80.7 | 58.1 | 70.6 | 100.8 |
| 594300 | 40 | 73.6 | 80.2 | 106.0 | 57.9 | 97.5 | 91.6 |
| 594292 | 40 | 55.6 | 52.0 | 71.9 | 46.2 | 72.1 | 81.6 |
| 569473 | 40 | 44.8 | 31.7 | 61.6 | 44.0 | 58.7 | 28.0 |
| 598769 | 40 | 31.7 | 28.9 | 49.7 | 26.8 | 45.0 | 38.6 |
| 570808 | 40 | 2.5 | 4.4 | 6.4 | 29.7 | 17.5 | 7.2 |
| 598777 | 40 | 53.3 | 31.8 | 76.4 | 42.7 | 44.6 | 111.6 |

TABLE 31
Dose-dependent inhibition of DMPK mRNA levels in
Cynomolgus Monkeys using Primer Probe Set RTS4447

| | | hDMPK mRNA levels (% PBS) | | | | | |
|---|---|---|---|---|---|---|---|
| ISIS No. | mg/kg/wk | TA | Quad (Left) | Gastroc | Kidney | Heart | Liver |
| PBS | 0 | 100.0 | 100.0 | 100.0 | 100.0 | 100.0 | 100.0 |
| 486178 | 40 | 26.7 | 29.0 | 32.9 | 57.0 | 49.4 | 58.1 |
| 445569 | 40 | 85.4 | 87.4 | 147.1 | 77.1 | 97.2 | 93.6 |
| 512497 | 40 | 66.4 | 70.4 | 94.2 | 81.9 | 87.6 | 79.5 |
| 598768 | 40 | 48.3 | 76.4 | 106.7 | 73.7 | 81.0 | 85.1 |
| 594300 | 40 | 100.9 | 113.5 | 219.6 | 96.9 | 131.0 | 118.9 |
| 594292 | 40 | 76.5 | 75.7 | 151.7 | 86.6 | 107.1 | 108.6 |
| 569473 | 40 | 52.6 | 51.7 | 114.2 | 72.9 | 87.2 | 53.7 |
| 598769 | 40 | 45.2 | 57.6 | 86.3 | 56.6 | 65.4 | 72.5 |
| 570808 | 40 | 6.6 | 8.3 | 14.8 | 60.7 | 27.9 | 35.0 |
| 598777 | 40 | 55.1 | 56.8 | 124.1 | 78.6 | 88.9 | 131.2 |

### Example 20: Thirteen (13) Week In Vivo Tolerability Study in Cynomolgus Monkeys

[0706] Groups of cynomolgus male monkeys were administered 40 mg/kg of ISIS 445569, ISIS 512497, ISIS 486178, ISIS 570808, ISIS 594292, ISIS 598768, ISIS 598769, ISIS 569473, ISIS 594300, and ISIS 598777 via subcutaneous injection on days 1, 3, 5, and 7. Following administration on day 7, each monkey was administered 40 mg/kg/wk of ISIS 445569, ISIS 512497, ISIS 486178, ISIS 570808, ISIS 594292, ISIS 598768, ISIS 598769, ISIS 569473, ISIS 594300, and ISIS 598777 via subcutaneous injection.

[0707] 48 hours after each monkey received a subcutaneous dose on days 28 and 91, blood and urine samples were taken for analysis. Some of the monkeys had blood and urine taken 48 hours after the dose given on day 56. Alanine aminotransferase (ALT), aspartate aminotransferase (AST), lactate dehydrogenase (LDH), and creatine kinase (CK) were measured for each animal in a treatment group and the average values are presented in the table below. Day of Sample values with a negative represent time point before treatment began. For example, a Day of Treatment value of −7 represents a sample taken 7 days before the first dose. Thirteen weeks after the first dose, the animals were sacrificed and tissue analysis was performed.

TABLE 32
Plasma Chemistry & Urine Analysis in Cynomolgus Monkeys

| ISIS | Day of | ALT | AST | LDH | CK |
|---|---|---|---|---|---|
| No. | Sample | (U/L) | (U/L) | (mg/dl) | (mg/dl) |
| Saline | −14 | 34.2 | 25.9 | 604.0 | 160.8 |
| | −7 | 38.8 | 27.8 | 861.3 | 249.0 |
| | 30 | 43.0 | 34.4 | 1029.0 | 300.0 |
| | 93 | 66.1 | 43.0 | 1257.3 | 898.8 |
| 486178 | −14 | 37.6 | 40.5 | 670.0 | 236.8 |
| | −7 | 49.8 | 55.0 | 1039.8 | 380.8 |
| | 30 | 47.0 | 41.2 | 875.4 | 415.0 |
| | 93 | 59.7 | 43.6 | 960.6 | 809.6 |
| 594292 | −14 | 38.9 | 32.0 | 776.3 | 375.8 |
| | −7 | 37.8 | 38.4 | 877.3 | 210.0 |
| | 30 | 35.4 | 39.6 | 666.0 | 93.8 |
| | 93 | 49.8 | 46.3 | 958.5 | 339.0 |
| 569473 | −14 | 49.4 | 49.8 | 1185.3 | 365.3 |
| | −7 | 50.4 | 59.7 | 1609.5 | 261.0 |
| | 30 | 46.7 | 52.5 | 1390.8 | 107.8 |
| | 93 | 56.3 | 49.8 | 1483.3 | 524.5 |
| 570808 | −14 | 47.1 | 46.8 | 896.0 | 448.3 |
| | −7 | 44.4 | 63.6 | 913.3 | 257.3 |
| | 30 | 47.1 | 57.7 | 660.5 | 125.0 |
| | 93 | 79.8 | 92.2 | 813.5 | 294.0 |
| 598768 | −14 | 37.9 | 41.6 | 666.3 | 253.8 |
| | −7 | 41.4 | 53.5 | 754.0 | 231.5 |
| | 30 | 37.2 | 38.9 | 652.3 | 106.3 |
| | 93 | 45.8 | 41.5 | 721.3 | 238.3 |
| 598769 | −14 | 44.2 | 36.1 | 1106.8 | 456.8 |
| | −7 | 45.7 | 41.5 | 1323.3 | 214.0 |
| | 30 | 40.3 | 42.0 | 981.0 | 147.8 |
| | 58 | 56.7 | 49.9 | 1101.5 | 552.3 |
| | 93 | 69.0 | 50.3 | 1167.3 | 749.5 |
| 512497 | −14 | 31.5 | 34.3 | 689.3 | 293.8 |
| | −7 | 39.0 | 45.4 | 1110.3 | 286.0 |
| | 30 | 47.2 | 60.2 | 960.5 | 202.5 |
| | 93 | 69.6 | 87.1 | 997.0 | 1118.5 |
| 594300 | −14 | 42.0 | 34.0 | 935.5 | 459.5 |
| | −7 | 42.1 | 53.6 | 1020.5 | 272.0 |
| | 30 | 28.0 | 34.6 | 620.8 | 124.5 |
| | 58 | 42.9 | 48.5 | 883.5 | 169.8 |
| | 93 | 45.7 | 45.7 | 835.5 | 252.3 |
| 598777 | −14 | 45.6 | 37.7 | 707.0 | 558.5 |
| | −7 | 43.3 | 50.0 | 705.8 | 200.3 |
| | 30 | 50.2 | 47.3 | 585.3 | 159.3 |
| | 93 | 79.2 | 56.1 | 1029.0 | 785.0 |
| 445569 | −14 | 40.2 | 44.2 | 835.8 | 404.0 |
| | −7 | 41.0 | 46.1 | 1074.3 | 305.5 |
| | 30 | 45.9 | 61.7 | 994.8 | 283.0 |
| | 58 | 51.6 | 85.1 | 739.0 | 117.8 |
| | 93 | 99.3 | 97.5 | 1583.5 | 2114.0 |

1. A compound comprising a single-stranded modified oligonucleotide consisting of 10-30 linked nucleosides and having a nucleobase sequence comprising a portion of at least 12 contiguous nucleobases 100% complementary to a target region of equal length of a DMPK nucleic acid, wherein the modified oligonucleotide comprises at least one modified internucleoside linkage and/or at least one modified nucleoside comprising a modified sugar.

2. The compound of claim 1, wherein the modified oligonucleotide has a nucleobase sequence comprising a portion of at least 12 contiguous nucleobases 100% complementary to an equal length portion of nucleobases 636-697, 1317-1366, 1446-1486, 1610-1638, 1635-1670, or 2696-2717 of SEQ ID NO: 1 or nucleobases 6445-6468, 6789-6806, 13628-13657, 13735-13760, or 13746-13905 of SEQ ID NO: 2, and wherein the nucleobase sequence of the modified oligonucleotide is at least 90% complementary to SEQ ID NO: 1 or SEQ ID NO: 2 as measured over the entirety of the modified oligonucleotide.

3. The compound of claim 2, wherein the modified oligonucleotide comprises at least one modified internucleoside linkage.

4. The compound of claim 3, wherein each internucleoside linkage is a phosphorothioate internucleoside linkage.

5. The compound of claim 4, wherein the modified oligonucleotide comprises at least one modified nucleoside comprising a modified sugar.

6. The compound of claim 5, wherein the modified oligonucleotide comprises at least two modified nucleosides comprising a modified sugar.

7. The compound of claim 5, wherein the modified sugar is a bicyclic sugar.

8. The compound of claim 7, wherein the bicyclic sugar is selected from cEt, LNA, α-L-LNA, ENA, and 2′-thio LNA.

9. The compound of claim 5, wherein the modified oligonucleotide comprises at least one 2′-substituted nucleoside.

10. The compound of claim 9, wherein the 2′-substituted nucleoside is selected from 2′-OCH₃, 2′-F, and 2′-O-methoxyethyl.

11. The compound of claim 10, wherein the modified oligonucleotide comprises:
a gap segment consisting of 7-11 linked deoxynucleosides;
a 5′ wing segment consisting of 2-6 linked nucleosides;
a 3′ wing segment consisting of 2-6 linked nucleosides;
wherein the gap segment is positioned between the 5′ wing segment and the 3′ wing segment and wherein each nucleoside of each wing segment comprises a modified sugar.

12. The compound of claim 11, wherein the modified oligonucleotide consists of 16, 17, 18, 19, or 20 linked nucleosides.

13. The compound of claim 1, wherein the modified oligonucleotide has a nucleobase sequence comprising a portion of at least 12 contiguous nucleobases of any of SEQ ID NOs: 33, 94-110, 530-539, 25, 117-128, 376-384, 176-197, 224-233, 246-262, 426-429, 487-489, 433, 681-685, 712-713, 269-277, 286-291, 23, 264, 294-311, or 426-430, and wherein the nucleobase sequence of the modified oligonucleotide is at least 90% complementary to SEQ ID NO: 1 or SEQ ID NO: 2 as measured over the entirety of the modified oligonucleotide.

14. The compound of claim 13, wherein the modified oligonucleotide comprises at least one modified internucleoside linkage.

15. The compound of claim 14, wherein each internucleoside linkage of the modified oligonucleotide is a phosphorothioate internucleoside linkage.

16. The compound of claim 15, wherein the modified oligonucleotide comprises at least one modified nucleoside comprising a modified sugar.

17. The compound of claim 16, wherein the modified oligonucleotide comprises at least two modified nucleosides comprising a modified sugar.

18. The compound of claim 16, wherein the modified sugar is a bicyclic sugar.

19. The compound of claim 18, wherein the bicyclic sugar is selected from cEt, LNA, α-L-LNA, ENA, and 2′-thio LNA.

20. The compound of claim 16, wherein the modified oligonucleotide comprises at least one 2′-substituted nucleoside.

21. The compound of claim 20, wherein the 2′-substituted nucleoside is selected from 2′-OCH₃, 2′-F, and 2′-O-methoxyethyl.

22. The compound of claim 21, wherein the modified oligonucleotide comprises:
a gap segment consisting of 7-10 linked deoxynucleosides;
a 5′ wing segment consisting of 2-5 linked nucleosides;
a 3′ wing segment consisting of 2-5 linked nucleosides;
wherein the gap segment is positioned between the 5′ wing segment and the 3′ wing segment and wherein each nucleoside of each wing segment comprises a modified sugar.

23. The compound of claim 22, wherein the modified oligonucleotide consists of 16, 17, 18, 19, or 20 linked nucleosides.

24. A composition comprising the compound of claim 1 and a pharmaceutically acceptable carrier or diluent.

25. A composition comprising the compound of claim 13 and a pharmaceutically acceptable carrier or diluent.

26. A method of treating type 1 myotonic dystrophy (DM1) in an animal comprising administering to an animal in need thereof a composition according to claim 2.

27. A method of treating type 1 myotonic dystrophy (DM1) in an animal comprising administering to an animal in need thereof a composition according to claim 13.

The application's sequence listing, which the Patent Office published only in electronic form, follows.

SEQUENCE LISTING (1446 sequences)

SEQ ID NO: 1 - RNA, 2877 nt, Homo sapiens
  source 1..2877: mol_type = mRNA
  CDS 206..2080: protein_id = 875; translation = MSAEVRLRRLQQLVLDPGFLGLEPLLDLLLGVHQELGASELAQDKY VADFLQWAEPIVVRLKEVRLQRDDFEILKVIGRGAFSEVAVVKMKQTGQVYAMKIMNKW DMLKRGEVSCFREERDVLVNGDRRWITQLHFAFQDENYLYLVMEYYVGGDLLTLLSKFG ERIPAEMARFYLAEIVMAIDSVHRLGYVHRDIKPDNILLDRCGHIRLADFGSCLKLRAD GTVRSLVAVGTPDYLSPEILQAVGGGPGTGSYGPECDWWALGVFAYEMFYGQTPFYADS TAETYGKIVHYKEHLSLPLVDEGVPEEARDFIQRLLCPPETRLGRGGAGDFRTHPFFFG LDWDGLRDSVPPFTPDFEGATDTCNFDLVEDGLTAMETLSDIREGAPLGVHLPFVGYSY SCMALRDSEVPGPTPMELEAEQLLEPHVQAPSLEPSVSPQDETAEVAVPAAVPAAEAEA EVTLRELQEALEEEVLTRQSLSREMEAIRTDNQNFASQLREAEARNRDLEAHVRQLQER MELLQAEGATAVTGVPSPRATDPPSHLDGPPAVAVGQCPLVGPGPMHRRHLLLPARVPR PGLSEALSLLLFAVVLSRAAALGCIGLVAHAGQLTAVWRRPGAARAP
aggggggctggaccaaggggtggggagaaggggaggaggcctcggccggccgcagagagaagtggccagagaggcccaggggacagccagggacaggcagacatgcagccagggctccagggcctggacaggggctgccaggccctgtgacaggaggaccccgagcccccggcccggggaggggccatggtgctgcctgtccaacatgtcagccgaggtgcggctgaggcggctccagcagctggtgttggacccgggcttcctggggctggagcccctgctcgaccttctcctgggcgtccaccaggagctgggcgcctccgaactggcccaggacaagtacgtggccgacttcttgcagtgggcggagcccatcgtggtgaggcttaaggaggtccgactgcagagggacgacttcgagattctgaaggtgatcggacgcggggcgttcagcgaggtagcggtagtgaagatgaagcagacgggccaggtgtatgccatgaagatcatgaacaagtgggacatgctgaagaggggcgaggtgtcgtgcttccgtgaggagagggacgtgttggtgaatggggaccggcggtggatcacgcagctgcacttcgccttccaggatgagaactacctgtacctggtcatggagtattacgtgggcggggacctgctgacactgctgagcaagtttggggagcggattccggccgagatggcgcgcttctacctggcggagattgtcatggccatagactcggtgcaccggcttggctacgtgcacagggacatcaaacccgacaacatcctgctggaccgctgtggccacatccgcctggccgacttcggctcttgcctcaagctgcgggcagatggaacggtgcggtcgctggtggctgtgggcaccccagactacctgtcccccgagatcctgcaggctgtgggcggtgggcctgggacaggcagctacgggcccgagtgtgactggtgggcgctgggtgtattcgcctatgaaatgttctatgggcagacgcccttctacgcggattccacggcggagacctatggcaagatcgtccactacaaggagcacctctctctgccgctggtggacgaaggggtccctgaggaggctcgagacttcattcagcggttgctgtgtcccccggagacacggctgggccggggtggagcaggcgacttccggacacatcccttcttctttggcctcgactgggatggtctccgggacagcgtgcccccctttacaccggatttcgaaggtgccaccgacacatgcaacttcgacttggtggaggacgggctcactgccatggagacactgtcggacattcgggaaggtgcgccgctaggggtccacctgccttttgtgggctactcctactcctgcatggccctcagggacagtgaggtcccaggccccacacccatggaactggaggccgagcagctgcttgagccacacgtgcaagcgcccagcctggagccctcggtgtccccacaggatgaaacagctgaagtggcagttccagcggctgtccctgcggcagaggctgaggccgaggtgacgctgcgggagctccaggaagccctggaggaggaggtgctcacccggcagagcctgagccgggagatggaggccatccgcacggacaaccagaacttcgccagtcaactacgcgaggcagaggctcggaaccgggacctagaggcacacgtccggcagttgcaggagcggatggagttgctgcaggcagagggagccacagctgtcacgggggtccccagtccccgggccacggatccaccttcccatctagatggccccccggccgtggctgtgggccagtgcccgctggtggggccaggccccatgcaccgccgccacctgctgctccctgccagggtccctaggcctggcctatcggaggcgctttccctgctcctgttcgccgttgttctgtctcgtgccgccgccctgggctgcattgggttggtggcccacgccggccaactcaccgcagtctggcgccgcccaggagccgcccgcgctccctgaaccctagaactgtcttcgactccggggccccgttggaagactgagtgcccggggcacggcacagaagccgcgcccaccgcctgccagttcacaaccgctccgagcgtgggtctccgcccagctccagtcctgtgatccgggcccgccccctagcggccggggagggaggggccgggtccgcggccggcgaacggggctcgaagggtccttgtagccgggaatgctgctgctgctgctgctgctgctgctgctgctgctgctgctgctgctgctgctgctgctggggggatcacagaccatttctttctttcggccaggctgaggccctgacgtggatgggcaaactgcaggcctgggaaggcagcaagccgggccgtccgtgttccatcctccacgcacccccacctatcgttggttcgcaaagtgcaaagctttcttgtgcatgacgccctgctctggggagcgtctggcgcgatctctgcctgcttactcgggaaatttgcttttgccaaacccgctttttcggggatcccgcgcccccctcctcacttgcgctgctctcggagccccagccggctccgcccgcttcggcggtttggatatttattgacctcgtcctccgactcgctgacaggctacaggacccccaacaaccccaatccacgttttggatgcactgagaccccgacattcctcggtatttattgtctgtccccacctaggacccccacccccgaccctcgcgaataaaaggccctccatctgcccaaaaaaaaaaaaaaaaaaaaaaaaaaaaa

SEQ ID NO: 2 - DNA, 14411 bp, Homo sapiens
  source 1..14411: mol_type = genomic DNA
ctcccagcccagcgcctcccaccccttttcatagcaggaaaagccggagcccagggagggaacggacctgcgagtcacacaactggtgacccacaccagcggctggagcaggaccctcttggggagaagagcatcctgcccgcagccagggcccctcatcaaagtcctcggtgttttttaaattatcagaactgcccaggaccacgtttcccaggccctgcccagctgggactcctcggtccttgcctcctagtttctcaggcctggccctctcaaggcccaggcaccccaggccggttggaggccccgacttccactctggagaaccgtccaccctggaaagaagagctcagattcctcttggctctcggagccgcagggagtgtgtcttcccgcgccaccctccaccccccgaaatgtttctgtttctaatcccagcctgggcaggaatgtggctccccggccaggggccaaggagctattttggggtctcgtttgcccagggagggcttggctccaccactttcctcccccagcctttgggcagcaggtcacccctgttcaggctctgagggtgccccctcctggtcctgtcctcaccaccccttccccacctcctgggaaaaaaaaaaaaaaaaaaaaaaaaagctggtataaagcagagagcctgagggctaaatttaactgtccgagtcggaatccatctctgagtcacccaagaagctgccctggcctcccgtccccttcccaggcctcaacccctttctcccacccagccccaacccccagccctcaccccctagcccccagttctggagcttgtcgggagcaagggggtggttgctactgggtcactcagcctcaattggccctgtttcagcaatgggcaggttcttcttgaaattcatcacacctgtggcttcctctgtgctctacctttttattggggtgacagtgtgacagctgagattctccatgcattccccctactctagcactgaagggttctgaagggccctggaaggagggagcttggggggctggcttgtgaggggttaaggctgggaggcgggaggggggctggaccaaggggtggggagaaggggaggaggcctcggccggccgcagagagaagtggccagagaggcccaggggacagccagggacaggcagacatgcagccagggctccagggcctggacaggggctgccaggccctgtgacaggaggaccccgagcccccggcccggggaggggccatggtgctgcctgtccaacatgtcagccgaggtgcggctgaggcggctccagcagctggtgttggacccgggcttcctggggctggagcccctgctcgaccttctcctgggcgtccaccaggagctgggcgcctccgaactggcccaggacaagtacgtggccgacttcttgcagtggggtgagtgcctaccctcggggctcctgcagatggggtgggggtggggcaggagacaggtctgggcacagaggcctggctgttgggggggcaggatggcaggatgggcatggggagatcctcccatcctggggctcagagtgtggacctgggccctggggcaacatttctctgtcctatgccaccactctggaggggcagagtaaggtcagcagaggctagggtggctgtgactcagagccatggcttaggagtcacagcaggctaggctgccaacagcctcccatggcctctctgcaccccgcctcagggtcagggtcagggtcatgctgggagctccctctcctaggaccctccccccaaaagtgggctctatggccctctcccctggtttcctgtggcctggggcaagccaggagggccagcatggggcagctgccaggggcgcagccgacaggcaggtgttcggcgccagcctctccagctgccccaacaggtgcccaggcactgggagggcggtgactcacgcgggccctgtgggagaaccagctttgcagacaggcgccaccagtgccccctcctctgcgatccaggagggacaactttgggttcttctgggtgtgtctccttcttttgtaggttctgcacccacccccacccccagccccaaagtctcggttcctatgagccgtgtgggtcagccaccattcccgccaccccgggtccctgcgtcctttagttctcctggcccagggcctccaaccttccagctgtcccacaaaaccccttcttgcaagggctttccagggcctggggccagggctggaaggaggatgcttccgcttctgccagctgccttgtctgcccacctcctccccaagcccaggactcgggctcactggtcactggtttctttcattcccagcaccctgcccctctggccctcatatgtctggccctcagtgactggtgtttggtttttggcctgtgtgtaacaaactgtgtgtgacacttgtttcctgtttctccgccttcccctgcttcctcttgtgtccatctctttctgacccaggcctggttcctttccctcctcctcccatttcacagatgggaaggtggaggccaagaagggccaggccattcagcctctggaaaaaccttctcccaacctcccacagcccctaatgactctcctggcctccctttagtagaggatgaagttgggttggcagggtaaactgagaccgggtggggtaggggtctggcgctcccgggaggagcactccttttgtggcccgagctgcatctcgcggcccctcccctgccaggcctggggcgggggagggggccagggttcctgctgccttaaaagggctcaatgtcttggctctctcctccctcccccgtcctcagccctggctggttcgtccctgctggcccactctcccggaaccccccggaacccctctctttcctccagaacccactgtctcctctccttccctcccctcccatacccatccctctctccatcctgcctccacttcttccacccccgggagtccaggcctccctgtccccacagtccctgagccacaagcctccaccccagctggtcccccacccaggctgcccagtttaacattcctagtcataggaccttgacttctgagaggcctgattgtcatctgtaaataaggggtaggactaaagcactcctcctggaggactgagagatgggctggaccggagcacttgagtctgggatatgtgaccatgctacctttgtctccctgtcctgttccttcccccagccccaaatccagggttttccaaagtgtggttcaagaaccacctgcatctgaatctagaggtactggatacaaccccacgtctgggccgttacccaggacattctacatgagaacgtgggggtggggccctggctgcacctgaactgtcacctggagtcagggtggaaggtggaagaactgggtcttatttccttctccccttgttctttagggtctgtccttctgcagactccgttaccccaccctaaccatcctgcacacccttggagccctctgggccaatgccctgtcccgcaaagggcttctcaggcatctcacctctatgggagggcatttttggcccccagaaccttacacggtgtttatgtggggaagcccctgggaagcagacagtcctagggtgaagctgagaggcagagagaaggggagacagacagagggtggggctttcccccttgtctccagtgccctttctggtgaccctcggttcttttcccccaccacccccccagcggagcccatcgtggtgaggcttaaggaggtccgactgcagagggacgacttcgagattctgaaggtgatcggacgcggggcgttcagcgaggtaagccgaaccgggcgggagcctgacttgactcgtggtgggcggggcataggggttggggcggggccttagaaattgatgaatgaccgagccttagaacctagggctgggctggaggcggggcttgggaccaatgggcgtggtgtggcaggtggggcggggccacggctgggtgcagaagcgggtggagttgggtctgggcgagcccttttgttttcccgccgtctccactctgtctcactatctcgacctcaggtagcggtagtgaagatgaagcagacgggccaggtgtatgccatgaagatcatgaacaagtgggacatgctgaagaggggcgaggtgaggggctgggcggacgtggggggctttgaggatccgcgccccgtctccggctgcagctcctccgggtgccctgcaggtgtcgtgcttccgtgaggagagggacgtgttggtgaatggggaccggcggtggatcacgcagctgcacttcgccttccaggatgagaactacctggtgagctccgggccggggtgactaggaagagggacaagagcccgtgctgtcactggacgaggaggtggggagaggaagctctaggattgggggtgctgcccggaaacgtctgtgggaaagtctgtgtgcggtaagagggtgtgtcaggtggatgaggggccttccctatctgagacggggatggtgtccttcactgcccgtttctggggtgatctgggggactcttataaagatgtctctgttgcggggggtctcttacctggaatgggataggtcttcaggaattctaacggggccactgcctagggaaggagtgtctgggacctattctctgggtgttgggtggcctctgggttctctttcccagaacatctcagggggagtgaatctgcccagtgacatcccaggaaagtttttttgtttgtgtttttttttgaggggcgggggcgggggccgcaggtggtctctgatttggcccggcagatctctatggttatctctgggctggggctgcaggtctctgcccaaggatggggtgtctctgggaggggttgtcccagccatccgtgatggatcagggcctcaggggactaccaaccacccatgacgaaccccttctcagtacctggtcatggagtattacgtgggcggggacctgctgacactgctgagcaagtttggggagcggattccggccgagatggcgcgcttctacctggcggagattgtcatggccatagactcggtgcaccggcttggctacgtgcacaggtgggtgcagcatggccgaggggatagcaagcttgttccctggccgggttcttggaaggtcagagcccagagaggccagggcctggagagggaccttcttggttggggcccaccggggggtgcctgggagtaggggtcagaactgtagaagccctacaggggcggaacccgaggaagtggggtcccaggtggcactgcccggaggggcggagcctggtgggaccacagaagggaggttcatttatcccacccttctcttttcctccgtgcagggacatcaaacccgacaacatcctgctggaccgctgtggccacatccgcctggccgacttcggctcttgcctcaagctgcgggcagatggaacggtgagccagtgccctggccacagagcaactggggctgctgatgagggatggaaggcacagagtgtgggagcgggactggatttggaggggaaaagaggtggtgtgacccaggcttaagtgtgcatctgtgtggcggagtattagaccaggcagagggaggggctaagcatttggggagtggttggaaggagggcccagagctggtgggcccagaggggtgggcccaagcctcgctctgctccttttggtccaggtgcggtcgctggtggctgtgggcaccccagactacctgtcccccgagatcctgcaggctgtgggcggtgggcctgggacaggcagctacgggcccgagtgtgactggtgggcgctgggtgtattcgcctatgaaatgttctatgggcagacgcccttctacgcggattccacggcggagacctatggcaagatcgtccactacaaggtgagcacggccgcagggagacctggcctctcccggtaggcgctcccaggctatcgcctcctctccctctgagcaggagcacctctctctgccgctggtggacgaaggggtccctgaggaggctcgagacttcattcagcggttgctgtgtcccccggagacacggctgggccggggtggagcaggcgacttccggacacatcccttcttctttggcctcgactgggatggtctccgggacagcgtgcccccctttacaccggatttcgaaggtgccaccgacacatgcaacttcgacttggtggaggacgggctcactgccatggtgagcgggggcggggtaggtacctgtggcccctgctcggctgcgggaacctccccatgctccctccataaagttggagtaaggacagtgcctaccttctggggtcctgaatcactcattccccagagcacctgctctgtgcccatctactactgaggacccagcagtgacctagacttacagtccagtgggggaacacagagcagtcttcagacagtaaggccccagagtgatcagggctgagacaatggagtgcagggggtgggggactcctgactcagcaaggaaggtcctggagggctttctggagtggggagctatctgagctgagacttggagggatgagaagcaggagaggactcctcctcccttaggccgtctctcttcaccgtgtaacaagctgtcatggcatgcttgctcggctctgggtgcccttttgctgaacaatactggggatccagcacggaccagatgagctctggtccctgccctcatccagttgcagtctagagaattagagaattatggagagtgtggcaggtgccctgaagggaagcaacaggatacaagaaaaaatgatggggccaggcacggtggctcacgcctgtaaccccagcaatttggcaggccgaagtgggtggattgcttgagcccaggagttcgagaccagcctgggcaatgtggtgagacccccgtctctacaaaaatgttttaaaaattggttgggcgtggtggcgcatgcctgtatactcagctactagggtggccgacgtgggcttgagcccaggaggtcaaggctgcagtgagctgtgattgtgccactgcactccagcctgggcaacggagagagactctgtctcaaaaataagataaactgaaattaaaaaataggctgggctggccgggcgtggtggctcacgcctgtaatctcagcactttgggaggccgaggcgggtggatcacgaggtcaggagatcgagaccatcttggctaacacggtgaaaccccatctctcctaaaaatacaaaaaattagccaggcgtggtggcgggcgcctgtagtcccagctactcaggaggctgaggcaggagaatggcgtgaacccgggaggcagagtttgcagtgagccgagatcgtgccactgcactccagcctgggcgacagagcgagactctgtctcagaaaaaaaaaaaaaaaaaaaaaaaaataggctggaccgcggccgggcgctgtggctcatgcctgtaatcccagcactttgggagtccaaggccggtgggtcatgagatcaggagttttgagactaggctggccaacacggtgaaaccccgtctctactaaaaatacaagaaaattagctgggtgtggtctcgggtgcctgtaattccagttactggggaagctgaggcaggagaattgcttgaacctgggaggcagagtttgcagtgagccaagatcatgccactacactccagtctgggtgacagagtgagactctgtctcaaaaaaaaaaaaaaaaaaaagggttgggcaaggtggttcacgcctgtaatcccagaactttgggaggctgaggcaggcagatcactggaagtcaggagttcaagaccagcctggccaacatggtgaaaccctgtgtctactaaaaatacaaaatttagccaggcttggtggcgtatgcctgtaatgccagctactcaggaggctgaggcaggagaatcgcttgattgaacctgggaggcagagtttgcagtgggctggggttgtgccactgcactctaggctgggagacagcaagactccatctaaaaaaaaaaaacagaactgggctgggcacagtggcttatatttgtaatcccagcactttgggaggctgaggttggaggactgcttgagcccagagtttgggactacaacagctgaggtaggcggatcacttgaggtcagaagatggagaccagcctggccagcgtggcgaaaccccgtctctaccaaaaatataaaaaattagccaggcgtggtagagggcgcctgtaatctcagctactcaggacgctgaggcaggagaatcgcctgaacctgggaggcggaggttgcagtgagctgagattgcaccactgcactccagcctgggtaacagagcgagactccgtatcaaagaaaaagaaaaaagaaaaaatgctggaggggccactttagataagccctgagttggggctggtttggggggaacatgtaagccaagatcaaaaagcagtgaggggcccgccctgacgactgctgctcacatctgtgtgtcttgcgcaggagacactgtcggacattcgggaaggtgcgccgctaggggtccacctgccttttgtgggctactcctactcctgcatggccctcaggtaagcactgccctggacggcctccaggggccacgaggctgcttgagcttcctgggtcctgctccttggcagccaatggagttgcaggatcagtcttggaaccttactgttttgggcccaaagactcctaagaggccagagttggaggaccttaaattttcagatctatgtacttcaaaatgttagattgaattttaaaacctcagagtcacagactgggcttcccagaatcttgtaaccattaacttttacgtctgtagtacacagagccacaggacttcagaacttggaaaatatgaagtttagacttttacaatcagttgtaaaagaatgcaaattctttgaatcagccatataacaataaggccatttaaaagtattaatttaggcgggccgcggtggctcacgcctgtaatcctagcactttgggaggccaaggcaggtggatcatgaggtcaggagatcgagaccatcctggctaacacggtgaaaccccgtctctactaaaaatacaaaaaaattagccgggcatggtggcgggcgcttgcggtcccagctacttgggaggcgaggcaggagaatggcatgaacccgggaggcggagcttgcagtgagccgagatcatgccactgcactccagcctgggcgacagagcaagactccgtctcaaaaaaaaaaaaaaaaaagtatttatttaggccgggtgtggtggctcacgcctgtaattccagtgctttgggaggatgaggtgggtggatcacctgaggtcaggagttcgagaccagcctgaccaacgtggagaaacctcatctctactaaaaaacaaaattagccaggcgtggtggcatatacctgtaatcccagctactcaggaggctgaggcaggagaatcagaacccaggagggggaggttgtggtgagctgagatcgtgccattgcattccagcctgggcaacaagagtgaaacttcatctcaaaaaaaaaaaaaaaaaagtactaatttacaggctgggcatggtggctcacgcttggaatcccagcactttgggaggctgaagtggacggattgcttcagcccaggagttcaagaccagcctgagcaacataatgagaccctgtctctacaaaaaattgaaaaaatcgtgccaggcatggtggtctgtgcctgcagtcctagctactcaggagtctgaagtaggagaatcacttgagcctggagtttgaggcttcagtgagccatgatagattccagcctaggcaacaaagtgagacctggtctcaacaaaagtattaattacacaaataatgcattgcttatcacaagtaaattagaaaatacagataaggaaaaggaagttgatatctcgtgagctcaccagatggcagtggtccctggctcacacgtgtactgacacatgtttaaatagtggagaacaggtgtttttttggtttgtttttttccccttcctcatgctactttgtctaagagaacagttggttttctagtcagcttttattactggacaacattacacatactataccttatcattaatgaactccagcttgattctgaaccgctgcggggcctgaacggtgggtcaggattgaacccatcctctattagaacccaggcgcatgtccaggatagctaggtcctgagccgtgttcccacaggagggactgctgggttggaggggacagccacttcataccccagggaggagctgtccccttcccacagctgagtggggtgtgctgacctcaagttgccatcttggggtcccatgcccagtcttaggaccacatctgtggaggtggccagagccaagcagtctccccatcaggtcggcctccctgtcctgaggccctgagaagaggggtctgcagcggtcacatgtcaagggaggagatgagctgaccctagaacatgggggtctggaccccaagtccctgcagaaggtttagaaagagcagctcccaggggcccaaggccaggagaggggcagggcttttcctaagcagaggaggggctattggcctacctgggactctgttctcttcgctctgctgctccccttcctcaaatcaggaggtcttggaagcagctgcccctacccacaggccagaagttctggttctccaccagagaatcagcattctgtctccctccccactccctcctcctctccccagggacagtgaggtcccaggccccacacccatggaactggaggccgagcagctgcttgagccacacgtgcaagcgcccagcctggagccctcggtgtccccacaggatgaaacagtaagttggtggaggggagggggtccgtcagggacaattgggagagaaaaggtgagggcttcccgggtggcgtgcactgtagagccctctagggacttcctgaacagaagcagacagaaaccacggagagacgaggttacttcagacatgggacggtctctgtagttacagtggggcattaagtaagggtgtgtgtgttgctggggatctgagaagtcgatctttgagctgagcgctggtgaaggagaaacaagccatggaaggaaaggtgccaagtggtcaggcgagagcctccagggcaaaggccttgggcaggtgggaatcctgatttgttcctgaaaggtagtttggctgaatcattcctgagaaggctggagaggccagcaggaaacaaaacccagcaaggccttttgtcgtgagggcattagggagctggagggattttgagcagcagagggacataggttgtgttagtgtttgagcaccagccctctggtccctgtgtagatttagaggaccagactcagggatggggctgagggaggtagggaagggagggggcttggatcattgcaggagctatggggattccagaaatgttgaggggacggaggagtaggggataaacaaggattcctagcctggaaccagtgcccaagtcctgagtcttccaggagccacaggcagccttaagcctggtccccatacacaggctgaagtggcagttccagcggctgtccctgcggcagaggctgaggccgaggtgacgctgcgggagctccaggaagccctggaggaggaggtgctcacccggcagagcctgagccgggagatggaggccatccgcacggacaaccagaacttcgccaggtcgggatcggggccggggccggggccgggatgcgggccggtggcaacccttggcatcccctctcgtccggcccggacggactcaccgtccttacctccccacagtcaactacgcgaggcagaggctcggaaccgggacctagaggcacacgtccggcagttgcaggagcggatggagttgctgcaggcagagggagccacaggtgagtccctcatgtgtccccttccccggaggaccgggaggaggtgggccgtctgctccgcggggcgtgtatagacacctggaggagggaagggacccacgctggggcacgccgcgccaccgccctccttcgcccctccacgcgccctatgcctctttcttctccttccagctgtcacgggggtccccagtccccgggccacggatccaccttcccatgtaagacccctctctttcccctgcctcagacctgctgcccattctgcagatcccctccctggctcctggtctccccgtccagatatagggctcaccctacgtctttgcgactttagagggcagaagccctttattcagccccagatctccctccgttcaggcctcaccagattccctccgggatctccctagataacctccccaacctcgattcccctcgctgtctctcgccccaccgctgagggctgggctgggctccgatcgggtcacctgtcccttctctctccagctagatggccccccggccgtggctgtgggccagtgcccgctggtggggccaggccccatgcaccgccgccacctgctgctccctgccagggtacgtccggctgcccacgcccccctccgccgtcgcgccccgcgctccacccgccccttgccacccgcttagctgcgcatttgcggggctgggcccacggcaggagggcggatcttcgggcagccaatcaacacaggccgctaggaagcagccaatgacgagttcggacgggattcgaggcgtgcgagtggactaacaacagctgtaggctgttggggcgggggcggggcgcagggaagagtgcgggcccacctatgggcgtaggcggggcgagtcccaggagccaatcagaggcccatgccgggtgttgacctcgccctctccccgcaggtccctaggcctggcctatcggaggcgctttccctgctcctgttcgccgttgttctgtctcgtgccgccgccctgggctgcattgggttggtggcccacgccggccaactcaccgcagtctggcgccgcccaggagccgcccgcgctccctgaaccctagaactgtcttcgactccggggccccgttggaagactgagtgcccggggcacggcacagaagccgcgcccaccgcctgccagttcacaaccgctccgagcgtgggtctccgcccagctccagtcctgtgatccgggcccgccccctagcggccggggagggaggggccgggtccgcggccggcgaacggggctcgaagggtccttgtagccgggaatgctgctgctgctgctgctgctgctgctgctgctgctgctgctgctgctgctgctgctgctggggggatcacagaccatttctttctttcggccaggctgaggccctgacgtggatgggcaaactgcaggcctgggaaggcagcaagccgggccgtccgtgttccatcctccacgcacccccacctatcgttggttcgcaaagtgcaaagctttcttgtgcatgacgccctgctctggggagcgtctggcgcgatctctgcctgcttactcgggaaatttgcttttgccaaacccgctttttcggggatcccgcgcccccctcctcacttgcgctgctctcggagccccagccggctccgcccgcttcggcggtttggatatttattgacctcgtcctccgactcgctgacaggctacaggacccccaacaaccccaatccacgttttggatgcactgagaccccgacattcctcggtatttattgtctgtccccacctaggacccccacccccgaccctcgcgaataaaaggccctccatctgcccaaagctctggactccacagtgtccgcggtttgcgttgtgggccggaggctccgcagcgggccaatccggaggcgtgtggaggcggccgaaggtctgggaggagctagcgggatgcgaagcggccgaatcagggttgggggaggaaaagccacggggcggggctttggcgtccggccaataggagggcgagcgggccacccggaggcaccgcccccgcccagctgtggcccagctgtgccaccgagcgtcgagaagagggggctgggctggcagcgcgcgcggccatcctccttccactgcgcctgcgcacgccacgcgcatccgctcctgggacgcaagctcgagaaaagttgctgcaaactttctagcccgttccccgcccctcctcccggccagacccgccccccctgcggagccgggaattccgaggggcggagcgcaggccgagatggggaatgtgggggcctgcagaggaccctggagacggaggcgtgcagaag

SEQ ID NO: 3 - DNA, 15000 bp, Mus musculus
  source 1..15000: mol_type = genomic DNA
cagtgtccccactgcccaaggctggctccatcacgtaccgctttggctcagctggccaggacacacagttctgcctgtgggacctcacagaagatgtgctctcccctcatccgtctctggcccgtacccgcacccttccgggcacacctggtgccaccccaccagcttctggtagttctcgggccggagagacaggtgcaggccccctgccccgctccctgtctcgttccaacagtctcccacacccagctggtggtggcaaggctggtgggcctagtgcatcgatggagcctggcataccattcagcattggccgctttgccacactgaccctgcaggagcggcgggaccggggagctgagaaggaacacaaacgctaccatagcctgggaaacatcagccgcggtggcagtgggggcaatagcagcaatgacaagctcagtggtcctgccccccgaagccgattggacccagctaaggtgctgggcacggcactgtgccctcggatccatgaggtgccactgctggagcctctcgtgtgcaagaagattgctcaggaacgcctgaccgtgctactgttcctggaggattgtatcatcactgcctgccaagagggcctcatctgcacctgggcccggccaggcaaggcggtgagtccgcacctgcccaagcgctgaggggcaccagttctgtccctaccggatgccagttatccgtcagcagaaaggtcaggtataggagacagaatggggggaaccacagctaacgtctttagagcctctgctggcccatatggctcatccttagtacttcacactcaaggcagaacctgtgtttataggaaatctgaagtgtagatggtgaaactttattcaggtctagggatgtgattgagctgggggcccacttctggcctgcctcttagacactgtttctgagccagctgctgaaggcctggatgggaattagccagggtccaggcctgcacttcctcttgctgctgtgtggtcctggtcattgggtctcacagatgggctgtgcagtggctgtgctcttagttggtgaggtgcaggcctgtcacctggtcaggcttgagcatgtggtctcagtgtctaggaccctactctgccctcagtccttcagtcccttgctttggaaggctagagtccagaagccttagaacgtcaggcagttgcagagccactgccaggctagtagggctgcgggagttgactgagttctcacagacacccctctgtctccctagttcacagacgaggagaccgaggcccaggcagggcaagcaagttggcccaggtcacccagcaagtcagttgtagaggtaggacaacccctgaagctgcaagtggaccccagtttcttttctctccactgtcgtcccctgtatgcccaggacacctggggccacattactgtggaagtgctactctgggtcagtggagacggccgagctgtttgttcctagctaggacagcagctttaggcctggggggcagatcccagctggggcagcagctccaaggcctttgggtggctccttctccgggttctggcagaagcccaggtgctgtctaatccacctttctcctcttgttctccccagggcatctcctcccaaccaggcagctcccccagtggcactgtggtgtgaaatgtggatgtcccatgttcccggcctcctagccataaccctccccgctgacctcaagaatcactgtattaacaagactaatcatgatggaaggactgctccaagccccacgctgcacacatactgggggtcccctaggttggcccagccatggggatgtagtgtcctgtgtggccttggccctgtcctccacccactgccaagtacaatgacctgttctctgaaacatcagtgttaaccatatccctgtcccagcatgtgactgttcactcctgggagagacttagcccacagtacccctgggtgagagggcagggcaggggccatccccactcctgcccaaactccaccccttgctatggtctgtgattttgaaagtgttaaattatggaagccctgagggccctccttgttcccctggacctcttatttatactaaagtccttgtttgcacagtgtttctgttccctggggcagggtagggtgggggttgcagtacttggcctccaagctgtgctctgaccaaaggaagcccaatcttagctgtttccccatccctagccccgagcagagagccctctgaaagatgagtctcgacccccaaagtcaagaggctgagatggccttcctactaggtccttggagatgtttgaaacttgttttaaacaccaggactatccaagcatgctctccttggggagaggaggatgctggaattgactgcactccctgcctcctctgaacatgcctttgcagtctgctgcccctggcccatttatgactggccatctagtgccagctggaggtcatgatttcctccccagagaactggccaccctagaaagaagctaacttgtcgcctggcttgctgtccaggcagctccgccctcaacccctaaaatgtttctgtctctaatcctagcccaggcaggaatgtggctgccccggcctgtggccaaggagctattttggggttctcttttgcttaaggagggcctggatccaccacttgcctcccccaggctggggccagcaggtcacccctggccctggcggctgagcaaactctctcctgatcttccttctacctcctgccaaaaaatgggggggcgggtaatacagcaggcacaggggctaaatttaactgtcccaaagtcggaatccattgctgagtcacgaagaagctgcccctggcctttgccccccccactaccccctcaccccctgttgcccaggcatcagccctttcccccaacccctcccagctctgagtctatagactggctctcctgggcactgacacctcccacctgtaactccctgtgctctctttatgggtgggtagagtcaatgggggggggcaaccctggagtattactctgtcccctgacattgggctctgaagagttttgaggggccctggaagaagggagttggggtgttggctcaggaggggttaaaaactgggaggcgggaggggggctgggccaaggggtggagaaaagaggaggaggccttaagcatagaactggccagagagacccaagggatagtcagggacgggcagacatgcagctagggttctggggcctggacaggggcagccaggccctgtgacgggaagaccccgagctccggcccggggaggggccatggtgttgcctgcccaacatgtcagccgaagtgcggctgaggcagctccagcagctggtgctggacccaggcttcctgggactggagcccctgctcgaccttctcctgggcgtccaccaggagctgggtgcctctcacctagcccaggacaagtatgtggccgacttcttgcagtggggtgagtatggataggaagcctggggttgggtgcaaggcagaggtgggtctacagggcaagaatgggctatggaggggcaggagggcctggaaagggctttttgtaagggagccaagcagagctcatgacctgaccccaagctcccctggtgaggcaccagggtcagtgaggccacctatgactcagccagtgcaggctggggtgggcatagcctcctgctatctcagcacccacactaggacctggcagctttctcttttaggacccttggctcctcaaactggcttcatagccctccccagtttcccagagtgtggggagggacagcgtggggcagctgccagggtgtggcccataggcaggtgtttggcgtctgcctccccagctgccctgacaggtgtccaggagctatgagggcactgtgactcacagaggccctgggggagaaccagcccggcagacaggcgccaccgagcaccctttctgttccccaaattaagaggaaggaacaacttcagcttctgagtgtgcccatccctagcactctgatcccgcccagcctttgtgggccagattggtcatccctcctggcttctcatctgcttttgtggttctagctcaagacctctaattcctctgctgacttaaatgcccttccccagaggtcttctcaggcctagtggacaagcttggagccttatctgctcctgcccaacattgagccaaagctccagcttaccccagcttccttacaagtaacgacctgttttgttgctctgtgcctattattaagggtccaggtcttgattcttggctgtctgcccatgtgtgtgaccctagtgcattctcccctcctcccccgtttcacagatggaaaggttgaggccatcggttagactgctaagcctgtgaaagactttttctcctctccagtctttagtgtctccctcaacctttcttttgaaggatggggtttgggctggcagggtaaactgagaactggggtgggggcagggggtctgaccctctgggaaggagcagtccttttgtggcctgagcagcatcctgtgggcccctcccctgccaggcctgggcgggggagggggcctgggttcccgctgccttaaaagggctcaacgccttggctctctcctcctccccaccccccagccttggccctagctgtatcttccccggctgcccactttcccaaacccctttcttctctgtgaccccatctccccgcttccccacacgtccctcctccatccttactccccggccttagaacttccctaagggagatctgacctccctctgcccaccccgcacccccagtcgccagcctcagacctagctgctctcccctctggctgaaccaccctagcacaggaccttataccctggagctttggttataagaagactctccttcaccctttggaaaccaagaaagcccttccaacagtgtccaggatgctggagggcagtgaccctcccccacttcttcttcgtgctggctgtgctgacacagctccagttcgaggttgtggcccgagacattaagtgagagccccgggtgacctgacttagcaccctgatcatcacatgggagtgaaaggcctgatgcgccagcttctcccactgcctccctttctgccctgcaaccctgtggaaacaggcagttctgggtcccacaaacatcacagaggttttgaaagcagaatcctaaagccgatttaaggggcagaaggaaggaggctataaagtcactacccttaccgctagtgttctgatgacccttggttcttcttcccccacccccgcccagtggagcccattgcagcaaggcttaaggaggtccgactgcagagggatgattttgagattttgaaggtgatcgggcgtggggcgttcagcgaggtgagtcttcagtggcctgggaatggaactttacttgatgtgggtggggcataacagctggggcagagccttaaaaattgatgaatgagcttgaatttaaggctggaggggtgggggcggagcttgtggtcagtgggcggtgtgcacgtgagggcggggctaaggttgggtggagataagggtggagtcctgtctgggtgagccttgctggttttccctgccacctcttgctgtcatctcggttccgtatttaggtagcggtggtgaagatgaaacagacgggccaagtgtatgccatgaagattatgaataagtgggacatgctgaagagaggcgaggtgagggccagggattagggcagcgccctcatctctccaactcacctcctgtagcttctctcctacctcacaggtgtcgtgcttccgggaagaaagggatgtattagtgaaaggggaccggcgctggatcacacagctgcactttgccttccaggatgagaactacctggtaagctccgggttcaggtgactaggaaagagtgacagttacatcgccccaagtcaagaaggctggagaagggagaagctgctgtagatcgggggggtgggggtgggggggacacacacaggggatgggggacgggggtaggattgtgtctcaagtataggagagaccttccttgagacaggagtgatatctggtttggcctttggatggggcgctctctcactgtgcgggggtcctctgtgcttgggaacggggtgtctttgggagtcttgggggctaccaaacccctgtgacacacccgctcccagtacctggtcatggaatactacgtgggcggggacctgctaacgctgctgagcaagtttggggagcggatccccgccgagatggctcgcttctacctggccgagattgtcatggccatagactccgtgcaccggctgggctacgtgcacaggtgggcgtggcggggcccttggagggttagcagaatttgtgtgggaaggaagggtacctgaaggtcagatcccattggggacagaatcggggtctagaattgtagaatcctgggtggggtggaagtggatcgagctgacgggccctaagagggaaggttttcaagaaagcacactttccctcttctctctatgcacagggacatcaaaccagataacattctgctggaccgatgtgggcacattcgcctggcagacttcggctcctgcctcaaactgcagcctgatggaatggtaagaagagcctggcgaaactctcctcattggtgaaggaccggattagggggcggggctgggttgaggagcaggaggggagcttggtctgggatgtcctgcgcaccatatttggacagtcaagggaaaggttttaagcattcaggtctgattggcacaggtgaggtcgctggtggctgtgggcaccccggactacctgtctcctgagattctgcaggccgttggtggagggcctggggcaggcagctacgggccagagtgtgactggtgggcactgggcgtgttcgcctatgagatgttctatgggcagacccccttctacgcggactccacagccgagacatatgccaagattgtgcactacagggtgagcacaagcaccatgcaggggggctgacttagtggcttgtgctcccagactgtcttttttaaaagatatttatttatatgtgtgtgttttctgtgtatgtatatctgtgcactgagtaggtgtgcgaaggtcagagggcatgggatcccctggaactggagtcacagactattgtgtgctgccatgctgagtgctgggaaacagaaccttgatcactctgcaagagcagccagtgcactgaaacgacagagccagctctgcagcccagggctaactgttgcttttctttctaaataggaacacttgtcgctgccgctggcagacacagttgtccccgaggaagctcaggacctcattcgtgggctgctgtgtcctgctgagataaggctaggtcgaggtggggcaggtgatttccagaaacatcctttcttctttggccttgattgggagggtctccgagacagtgtacccccctttacaccagacttcgagggtgccacggacacatgcaatttcgatgtggtggaggaccggctcactgccatggtgagcgggggcggggtacgtacctgcagttcctgatccgttgaggggacttccctagcctcttccataaaattggggtgattggccaggtgtggtggtgcatacctttaatcgtagaacttcataggcagaggcaggtggctctctggtaaatcaaggccatcttggtctacatagtgacttctaggccagtcaggagtgagatcctcccttgaaaaataaaaaagggggtgttgaccttcctgggtcccaaattattatcctagagcactgctatgtatccactcaggtatgaggacacacaggtgaccagtcccaaagacagtgagtgaggcctcactcttggcagtactaaaattgattgtagggggctgggctcttgacccagcctggaaagtgctggagggcttcctggaggaggagactagctgagcccagaaggatgcaggagatcctttctcgggtgagtgctctcagcattttaacaagctctaggccctgcagagagaagtctggtgtgggcagagccccaatagaaagcaacaagatagaagagaaaatggtggagtttgttagtgggggcagttatgccgtgaacatagaggggcgaagggccatctcggataactgctagccacaagagccctgtctgtcttcctaggagacgctgtcagacatgcaggaagacatgccccttggggtgcgcctgcccttcgtgggctactcctactgctgcatggccttcaggtgagcacgactgccccctgctggggcctgtgtgcaggcccaccacagccactcaattgaaggctcagtcttcaaaccaagtattcctaggagctgtctaagttaggctttctgctgctgcgatgaaccctgactaaaagcaagctggggaggaaaaggcttatcgggcttacgtttccacatgggagcccatcactgaaggaagccaggacaggaactcacagcggggcaggaacgtggagctgatgcagaggcaatggaggggagctgcttactgacttgatccttatgtcttcctcagcctgtttccttgtagagcccaggaccaccaggccagtgagggctccactcacaatgggctgagctctcatctatgatcactagttatgaaaatgcccgataggcttgcctgcagcttcagtttttgaggcactttccttccttccttccttccttccttccttccttccttcctttctttctttctttctttctttctttctttctttctttctttctttctttctttctttcttagtcttttagagacagggtctttctatgtagctctggctgtcttggaattcattctgtagaccaggctggtcttatttatttattttatgtatgtgagtccactatcactgtcctcagacacaccagaagagggcatcagatcccattacagatggctgtgagccaccatgtggttgctgggaattgaactcaggacctctggaagagcagccagtgctcctgccctgtagaggcattttcttcatgaaggctgtctcctctctgatgacttgatgactctagcttgttgtgtcaagtggacataagactaggaaagcagctacacatgcactttgtttatttttgttttgctttttgagactgggtctctccatctcatagctctggccatcctgcctggtgacattccagtccagttgtataacctaagaatctgagactcagccttgcagaatcctgctattaacgggtctaggacactccatagaatccaggatcttagaaaaacaaacctgaagtgtgacagtttattttaagaacacaattggagcacataacaataatacaacttttcagttttaaaaagttttctgtcttgttttttgaggcaggagctccttaatatagtctaagccgccctgcgagtgctgtgattgatgggcatgtaccaccatgcctagtcaataaagcctttaaaaagcatccgttatgctggctgtggtgccacaaacctgtaatcccagcacttagaaggtagaggcaagattatcagaaattcaaggccatcctgggctatacagtaatctaaggctagcctggtctacaagagactctgtctaaagaaacaaaagataaatagcacccactattgctaggcaatataaccctataaccccaccattgaggaggctgaggctggagcatcactgcaaatttgaggccaggatggtcaacaaataagtcccagagctggcatagaggaactctgtctcaacaataaagagaacttatctagcatttatgagggtaaataaaaatttaccattgccacaaaaaatgtaaatgaagagactgcttttaggagtgaactgggaagcagggaacacttagaggatgctcactcacacaggtatccaccatcaggcatgcctcaggcctgcacagggaaggacaacttgtttcatgatttgcaagcagcatcccatgctccttagagcgggttgggcccagcccaccctctgtggagttatcgctcagccaggcagcaaggcagccaaggtgctgaggccctggcagtctgctctcttctctgctctgaacctcctttagctttagcctaggagcctggcctggtgcccacaggctagggagtccctagcctcttcctcttctcagagacaatcaggtcccggaccccacccctatggaactagaggccctgcagttgcctgtgtcagacttgcaagggcttgacttgcagcccccagtgtccccaccggatcaagtggtgagtagactgagaggtgggcaaagcttcctgggtgggtgtacctgcagtgccaactgccaggctgttaattcagtaggacactgtccccaactggcccaactgcacatcctgtagtcaggaggcacaggcagaaaaatcccaaattcaaggcttgctcccgttatgtaatgagatcctgtcttggagtaaaaaacaaagaagagaactagggatagctcagaggtagatgctctcctggcatgggggtggggtcagaaagcaacaccaaccggggcctgggagggagggactgccaaccacctggaggagtctggggtagacttggtgaacaaagttcagaggccatcaggtgggatgctggtttcttaaaagccacagataggtgggtagcattggaaagaggagtggggggttgcagaaagtgacaagacacaaactggggaggcctaagggtaaagccagggttgtctgaagcactgtggagctgggaggaacacgctaaacttctgacttcagcccttcagttcccctgttgactacactgtccccagggacccagggatggggagaggtggacgggggagggaagtacgggactgatccagctccaggtcccaactctgatccccaccgacaggctgaagaggctgacctagtggctgtccctgcccctgtggctgaggcagagaccacggtaacgctgcagcagctccaggaagccctggaagaagaggttctcacccggcagagcctgagccgcgagctggaggccatccggaccgccaaccagaacttctccaggtcagggtcacagtgctggggtgaggggagaggagagcagcaaccctcgcagtctcctcaccgataggtcggctcactcccctatctttcccagccaactacaggaggccgaggtccgaaaccgagacctggaggcgcatgttcggcagctacaggaacggatggagatgctgcaggccccaggagccgcaggcgagtccctcacctgcttccagccaagggggcactgggtggagatggggggcatgttgggtgtgtgaaccctcggggcaggggaggagtccaggctggggcaccgcagccgcgccactgcctttctcctccatcctccacactccatacacctctctcttctccttccagccatcacgggggtccccagtccccgggccacggatccaccttcccatgtaagacccctctctcccctccccgatccccatcttagatatgctacccacagcccttctcccgtccacgtttagggtccattctccttgggggttccagaagaaagctgcccttcactcatccattcagcatgcactatctaccagctctccctcgtttcaggcttctcgccaaatcctccccaagggaactccctatactcccgttctggcctcgactagattcccgcactgcctctcgccctgctgctgggctccgatcgggtcacctgtcccttctctctccagctagatggccccccggccgtggctgtgggccagtgcccgctggtggggccaggccccatgcaccgccgtcacctgctgctccctgccagggtatgtcccacgtccgcccaccacgggcctctgcctagctctgcccactgagtgtcaccactgcttgctgtgcctctgtggagctcggcccaccgcagggagggggggtattcgggcggccaatcaacacaggctgctgctaagtagccaatgacgagttccaacaggagctctttcttgcgagcagaccaactttagctgcgggctgtggggaccagagatgcgctcagaggcccatctatgggtataggctgggcggctcccaggagccagtgggcccctgtagcctagtgctaatccaaccttctctcctgcagatccctaggcctggcctatccgaggcgcgttgcctgctcctgttcgccgctgctctggctgctgccgccacactgggctgcactgggttggtggcctataccggcggtctcaccccagtctggtgtttcccgggagccaccttcgccccctgaaccctaagactccaagccatctttcatttaggcctcctaggaaggtcgagcgaccagggagcgacccaaagcgtctctgtgcccatcgcgccccccccccccccccaccgctccgctccacacttctgtgagcctgggtccccacccagctccgctcctgtgatccaggcctgccacctggcggccggggagggaggaacagggctcgtgcccagcacccctggttcctgcagagctggtagccaccgctgctgcagcagctgggcattcgccgaccttgctttactcagccccgacgtggatgggcaaactgctcagctcatccgatttcactttttcactctcccagccatcagttacaagccataagcatgagccccctatttccagggacatcccattcccatagtgatggatcagcaagacctctgccagcacacacggagtctttggcttcggacagcctcactcctgggggttgctgcaactccttccccgtgtacacgtctgcactctaacaacggagccacagctgcactcccccctcccccaaagcagtgtgggtatttattgatcttgttatctgactcactgacagactccgggacccacgttttagatgcattgagactcgacattcctcggtatttattgtctgtccccacctacgacctccactcccgacccttgcgaataaaatacttctggtctgccctaaatcccgcgcaatatctctgttgtggaaaggaaaccgccccgcaggccaatggagagtccaatagagacaaccaatggcttgagtgggagctagaggggaggcaaagcgcacgaatcaggttgaagggtggggcttaggcatccagccagtaggagagaagcaacaagccaccagagacaccaccgccccccaccctcccccccagctgtgacccagctgtgccactcaagtttggaaaaaagtagggggttgggccagcagcgggcacaccatcttcccactgcgcctgcgcaagccacgcgcatccgctttttggaccgacactccagaaaagttgctgcaaactttctagcgcgattccccgcccctcctcccagctagatccaccgcctacccgcggggccgggaattccgaggggcggagcacggcgcggagatgggaagggagggggcccttcaagggacccgggagatgggagcggcttcgcgcccttaaccctccggacggcccattaccttctccgttgctctgatagggaaactgaggccctgagtcagaggcacacaaggggggaaggccaaaagcgcggccagagacggagggaaaacaaagaatcctgacagcccgggaggggggcggacacacagggacaaggacagacccgagtgcagagctgggtctagtctttgggagggggccagaagactgcaaggggaccgggggggggggcggcgaggaggactgggcggaggagggggctggggaagcccgcgggaggcggcaaaggagggaggaactttccaaagttgccaaacatggctacctcgcctgcggagccgagcgcggggcccgcggctcggggggaggcggcggcggcgaccgaggagcaggaggaggaagcgcgccagcttctgcagactctgcaggcagccgagggggaggcggcggcggccggggcgggagatgcggcggcggcggcggactctgggtccccgagtggcccggggtctccccgggagaccgtgaccgaggtgcccactggccttcgcttctcgcccgaacaggtggcatgcgtgtgcgaggcgctgctgcaggcgggccacgccggccgcttgagccgcttcctgggcgcgctgcccccggccgagcgcctacgtggcagcgatccggtgctgcgcgcgcgggccctagtggccttccagcggggtgaatacgccgagctctaccaacttctcgagagccgccctttccccgccgcccaccacgccttcctgcaggacctctacctgcgcgcgcgctaccacgaggccgagcgggcccgtggccgtgcgctgggcgctgtggacaaataccggctgcgcaagaagttccctctgcccaagaccatctgggatggcgaggagaccgtctattgcttcaaggagcgctcgcgagcggcgctcaaggcctgctaccgcggcaaccgctatcccacgcctgacgagaagcgccgcctggccacgctcaccggcctctcgcttacacaggtcagcaactggttcaagaaccggcgacagcgcgaccgcactgggaccggcggtggagcgccttgcaaaaggtgaggggggaaccgaccctccttcctcggtggccgctggagtctgcgcaagtgacccttcacatccctcttcggtggcgtcggcgagtgcataggctgagcgtggagagaccaggcacaccctgggttctctgggcatcactgcctcaggggcagaggttgttccagctacttctaagctgggaacgcagtgccaggaatgggggggggggcgggggcgggacgggcagtga

SEQ ID NO: 4 - RNA, 1896 nt, Mus musculus
  source 1..1896: mol_type = mRNA
  CDS 1..1896: protein_id = 876; translation = MSAEVRLRQLQQLVLDPGFLGLEPLLDLLLGVHQELGASHLAQDKY VADFLQWVEPIAARLKEVRLQRDDFEILKVIGRGAFSEVAVVKMKQTGQVYAMKIMNKW DMLKRGEVSCFREERDVLVKGDRRWITQLHFAFQDENYLYLVMEYYVGGDLLTLLSKFG ERIPAEMARFYLAEIVMAIDSVHRLGYVHRDIKPDNILLDRCGHIRLADFGSCLKLQPD GMVRSLVAVGTPDYLSPEILQAVGGGPGAGSYGPECDWWALGVFAYEMFYGQTPFYADS TAETYAKIVHYREHLSLPLADTVVPEEAQDLIRGLLCPAEIRLGRGGAGDFQKHPFFFG LDWEGLRDSVPPFTPDFEGATDTCNFDVVEDRLTAMVSGGGETLSDMQEDMPLGVRLPF VGYSYCCMAFRDNQVPDPTPMELEALQLPVSDLQGLDLQPPVSPPDQVAEEADLVAVPA PVAEAETTVTLQQLQEALEEEVLTRQSLSRELEAIRTANQNFSSQLQEAEVRNRDLEAH VRQLQERMEMLQAPGAAAITGVPSPRATDPPSHLDGPPAVAVGQCPLVGPGPMHRRHLL LPARIPRPGLSEARCLLLFAAALAAAATLGCTGLVAYTGGLTPVWCFPGATFAP
atgtcagccgaagtgcggctgaggcagctccagcagctggtgctggacccaggcttcctgggactggagcccctgctcgaccttctcctgggcgtccaccaggagctgggtgcctctcacctagcccaggacaagtatgtggccgacttcttgcagtgggtggagcccattgcagcaaggcttaaggaggtccgactgcagagggatgattttgagattttgaaggtgatcgggcgtggggcgttcagcgaggtagcggtggtgaagatgaaacagacgggccaagtgtatgccatgaagattatgaataagtgggacatgctgaagagaggcgaggtgtcgtgcttccgggaagaaagggatgtattagtgaaaggggaccggcgctggatcacacagctgcactttgccttccaggatgagaactacctgtacctggtcatggaatactacgtgggcggggacctgctaacgctgctgagcaagtttggggagcggatccccgccgagatggctcgcttctacctggccgagattgtcatggccatagactccgtgcaccggctgggctacgtgcacagggacatcaaaccagataacattctgctggaccgatgtgggcacattcgcctggcagacttcggctcctgcctcaaactgcagcctgatggaatggtgaggtcgctggtggctgtgggcaccccggactacctgtctcctgagattctgcaggccgttggtggagggcctggggcaggcagctacgggccagagtgtgactggtgggcactgggcgtgttcgcctatgagatgttctatgggcagacccccttctacgcggactccacagccgagacatatgccaagattgtgcactacagggaacacttgtcgctgccgctggcagacacagttgtccccgaggaagctcaggacctcattcgtgggctgctgtgtcctgctgagataaggctaggtcgaggtggggcaggtgatttccagaaacatcctttcttctttggccttgattgggagggtctccgagacagtgtacccccctttacaccagacttcgagggtgccacggacacatgcaatttcgatgtggtggaggaccggctcactgccatggtgagcgggggcggggagacgctgtcagacatgcaggaagacatgccccttggggtgcgcctgcccttcgtgggctactcctactgctgcatggccttcagagacaatcaggtcccggaccccacccctatggaactagaggccctgcagttgcctgtgtcagacttgcaagggcttgacttgcagcccccagtgtccccaccggatcaagtggctgaagaggccgacctagtggctgtccctgcccctgtggctgaggcagagaccacggtaacgctgcagcagctccaggaagccctggaagaagaggttctcacccggcagagcctgagccgcgagctggaggccatccggaccgccaaccagaacttctccagccaactacaggaggccgaggtccgaaaccgagacctggaggcgcatgttcggcagctacaggaacggatggagatgctgcaggccccaggagccgcagccatcacgggggtccccagtccccgggccacggatccaccttcccatctagatggccccccggccgtggctgtgggccagtgcccgctggtggggccaggccccatgcaccgccgtcacctgctgctccctgccaggatccctaggcctggcctatccgaggcgcgttgcctgctcctgttcgccgctgctctggctgctgccgccacactgggctgcactgggttggtggcctataccggcggtctcaccccagtctggtgtttcccgggagccaccttcgccccctga

SEQ ID NO: 5 - RNA, 771 nt, Mus musculus
  source 1..771: mol_type = mRNA
cctgcccctgtggctgaggcagagaccacggtaacgctgcagcagctccaggaagccctggaagaagaggttctcacccggcagagctngagccgcgagctggaggccatccggaccgccaaccagaacttctccagccaactacaggaggccgaggtccgaaaccgagacctggaggcgcatgttcggcagctacaggaacggatggagatgctgcaggccccaggagccgccggantccctcacctgcttccagccaagggggcactgggtggagatggggggcatgttgggtgtgtgaaccctcggggcaggggaggagtccaggctggggcaccgcgccgcgccactgcctttctcctccatcctccacactccatacacctctctcttctccttccagccatcacgggggtcccagtccccgggccacggatccaccttcccatctagatggccccccggcggtggctgtgggccagtgcccgctggtggggccaggacantgtcaccgccgtcacctgctgctccctgccaggattcctaggcctggctatccgaggcgcgttgctgctcctgttcgccgctgctctggctgctgcgccacactgggctgcactgggttggttggctataccggcggtcttcacccagtctggtgtttcccgtgagcacccttcgcccctgaaacctaagacttcaagccatctttcatttaggccttctaggaaggtcgagcgacaggggagcgacccaaagcgtctctgtgcc

SEQ ID NO: 6 - RNA, 434 nt, Mus musculus
  source 1..434: mol_type = mRNA
gagagacccaaggggtagtcagggacgggcagacatgcagctagggttctggggcctggacaggggcagccaggccctgtgacgggaagaccccgagctccggcccggggaggggccatggtgttgcctgcccaacatgtcagccgaagtgcggctgaggcagctccagcagctggtgctggacccaggcttcctgggactggagcccctgctcgaccttctcctgggcgtccaccaggagctgggtgcctctcacctagcccaggacaagtatgtggccgacttcttgcagtgggtggagcccattgcagcaaggcttaaggaggtccgactgcagagggatgattttgagattttgaaggtgatcgggcgtggggcgttcagcgaggtagcggtggtgaagatgaaacacacggagtctttggcttcggaca

SEQ ID NO: 7 - RNA, 2688 nt, Mus musculus
  source 1..2688: mol_type = mRNA
  CDS 134..1747: protein_id = 877; translation = MSAEVRLRQLQQLVLDPGFLGLEPLLDLLLGVHQELGASHLAQDKY VADFLQWVEPIAARLKEVRLQRDDFEILKVIGRGAFSEVAVVKMKQTGQVYAMKIMNKW DMLKRGEVSCFREERDVLVKGDRRWITQLHFAFQDENYLYLVMEYYVGGDLLTLLSKFG ERIPAEMARFYLAEIVMAIDSVHRLGYVHRDIKPDNILLDRCGHIRLADFGSCLKLQPD GMVRSLVAVGTPDYLSPEILQAVGGGPGAGSYGPECDWWALGVFTYEMFYGQTPFYADS TAETYAKIVHYREHLSLPLADTVVPEEAQDLIRGLLCPAEIRLGRGGAGDFQKHPFFFG LDWEGLRDSVPPFTPDFEGATDTCNFDVVEDRLTAMVSGGGETLSDMQEDMPLGVRLPF VGYSYCCMAFRDNQVPDPTPMELEALQLPVSDLQGLDLQPPVSPPDQVAEEADLVAVPA PVAEAETTVTLQQLQEALEEEVLTRQSLSRELEAIRTANQNFSSQLQEAEVRNRDLEAH VRQLQERMEMLQAPGAADP
ccacgcgtccgcccacgcgtccggggcagacatgcagctagggttctggggcctggacaggggcagccaggccctgtgacgggaagaccccgagctccggcccggggaggggccatggtgttgcctgcccaacatgtcagccgaagtgcggctgaggcagctccagcagctggtgctggacccaggcttcctgggactggagcccctgctcgaccttctcctgggcgtccaccaggagctgggtgcctctcacctagcccaggacaagtatgtggccgacttcttgcagtgggtggagcccattgcagcaaggcttaaggaggtccgactgcagagggatgattttgagattttgaaggtgatcgggcgtggggcgttcagcgaggtagcggtggtgaagatgaaacagacgggccaagtgtatgccatgaagattatgaataagtgggacatgctgaagagaggcgaggtgtcgtgcttccgggaagaaagggatgtattagtgaaaggggaccggcgctggatcacacagctgcactttgccttccaggatgagaactacctgtacctggtcatggaatactacgtgggcggggacctgctaacgctgctgagcaagtttggggagcggatccccgccgagatggctcgcttctacctggccgagattgtcatggccatagactccgtgcaccggctgggctacgtgcacagggacatcaaaccagataacattctgctggaccgatgtgggcacattcgcctggcagacttcggctcctgcctcaaactgcagcctgatggaatggtgaggtcgctggtggctgtgggcaccccggactacctgtctcctgagattctgcaggccgttggtggagggcctggggcaggcagctacgggccagagtgtgactggtgggcactgggcgtgttcacctatgagatgttctatgggcagacccccttctacgcggactccacagccgagacatatgccaagattgtgcactacagggaacacttgtcgctgccgctggcagacacagttgtccccgaggaagctcaggacctcattcgtgggctgctgtgtcctgctgagataaggctaggtcgaggtggggcaggtgatttccagaaacatcctttcttctttggccttgattgggagggtctccgagacagtgtacccccctttacaccagacttcgagggtgccacggacacatgcaatttcgatgtggtggaggaccggctcactgccatggtgagcgggggcggggagacgctgtcagacatgcaggaagacatgccccttggggtgcgcctgcccttcgtgggctactcctactgctgcatggccttcagagacaatcaggtcccggaccccacccctatggaactagaggccctgcagttgcctgtgtcagacttgcaagggcttgacttgcagcccccagtgtccccaccggatcaagtggctgaagaggctgacctagtggctgtccctgcccctgtggctgaggcagagaccacggtaacgctgcagcagctccaggaagccctggaagaagaggttctcacccggcagagcctgagccgcgagctggaggccatccggaccgccaaccagaacttctccagccaactacaggaggccgaggtccgaaaccgagacctggaggcgcatgttcggcagctacaggaacggatggagatgctgcaggccccaggagccgcagatccctaggcctggcctatccgaggcgcgttgcctgctcctgttcgccgctgctctggctgctgccgccacactgggctgcactgggttggtggcctataccggcggtctcaccccagtctggtgtttcccgggagccaccttcgccccctgaaccctaagactccaagccatctttcatttaggcctcctaggaaggtcgagcgaccagggagcgacccaaagcgtctctgtgcccatcgcccccccccccccccccaccgctccgctccacacttctgtgagcctgggtccccacccagctccgctcctgtgatccaggcctgccacctggcggccggggagggaggaacagggctcgtgcccagcacccctggttcctgcagagctggtagccaccgctgctgcagcagctgggcattcgccgaccttgctttactcagccccgacgtggatgggcaaactgctcagctcatccgatttcactttttcactctcccagccatcagttacaagccataagcatgagccccctatttccagggacatcccattcccatagtgatggatcagcaagacctctgccagcacacacggagtctttggcttcggacagcctcactcctgggggttgctgcaactccttccccgtgtacacgtctgcactctaacaacggagccacagctgcactcccccctcccccaaagcagtgtgggtatttattgatcttgttatctgactcactgacagactccgggacccacgttttagatgcattgagactcgacattcctcggtatttattgtctgtccccacctacgacctccactcccgacccttgcgaataaaatacttctggtctgccctaaaaaaaaaaaaaaaaaaaaaaaaaaaaaaaaaaaaaaaaaaaaaaaaaaaaaaaaaaaaaaaaaaaaaaaaaaaaaaaaa

SEQ ID NO: 8 - RNA, 2862 nt, Mus musculus
  source 1..2862: mol_type = mRNA
gggatagtcagggacgggcagacatgcagctagggttctggggcctggacaggggcagccaggccctgtgacgggaagaccccgagctccggcccggggaggggccatggtgttgcctgcccaacatgtcagccgaagtgcggctgaggcagctccagcagctggtgctggacccaggcttcctgggactggagcccctgctcgaccttctcctgggcgtccaccaggagctgggtgcctctcacctagcccaggacaagtatgtggccgacttcttgcagtgggtggagcccattgcagcaaggcttaaggaggtccgactgcagagggatgattttgagattttgaaggtgatcgggcgtggggcgttcagcgaggtagcggtggtgaagatgaaacagacgggccaagtgtatgccatgaagattacgaataagtgggacatgctgaagagaggcgaggtgtcgtgcttccgggaagaaagggatgtattagtgaaaggggaccggcgctggatcacacagctgcactttgccttccaggatgagaactacctgtacctggtcatggaatactacgtgggcggggacctgctaacgctgctgagcaagtttggggagcggatccccgccgagatggctcgcttctacctggccgagattgtcatggccatagactccgtgcaccggctgggctacgtgcacagggacatcaaaccagataacattctgctggaccgatgtgggcacattcgcctggcagacttcggctcctgcctcaaactgcagcctgatggaatggtgaggtcgctggtggctgtgggcaccccggactacctgtctcctgagattctgcaggccgttggtggagggcctggggcaggcagctacgggccagagtgtgactggtgggcactgggcgtgttcacctatgagatgttctatgggcagacccccttctacgcggactccacagccgagacatatgccaagattgtgcactacagggaacacttgtcgctgccgctggcagacacagttgtccccgaggaagctcaggacctcattcgtgggctgctgtgtcctgctgagataaggctaggtcgaggtggggcaggtgatttccagaaacatcctttcttctttggccttgattgggagggtctccgagacagtgtacccccctttacaccagacttcgagggtgccacggacacatgcaatttcgatgtggtggaggaccggctcactgccatggagacgctgtcagacatgcaggaagacatgccccttggggtgcgcctgcccttcgtgggctactcctactgctgcatggccttcagagacaatcaggtcccggaccccacccctatggaactagaggccctgcagttgcctgtgtcagacttgcaagggcttgacttgcagcccccagtgtccccaccggatcaagtggctgaagaggctgacctagtggctgtccctgcccctgtggctgaggcagagaccacggtaacgctgcagcagctccaggaagccctggaagaagaggttctcacccggcagagcctgagccgcgagctggaggccatccggaccgccaaccagaacttctccagccaactacaggaggccgaggtccgaaaccgagacctggaggcgcatgttcggcagctacaggaacggatggagatgctgcaggccccaggagccgcagccatcacgggggtccccagtccccgggccacggatccaccttcccatgcttctcgccaaatcctccccaagggaactccctagactcccgttctggcctcgactagattcccgcactgcctctcgccctgctgctgggctccgatcgggtcacctgtcccttctctctccagctagatggccccccggccgtggctgtgggccagtgcccgctggtggggccaggccccatgcaccgccgtcacctgctgctccctgccaggatccctaggcctggcctatccgaggcgcgttgcctgctcctgttcgccgctgctctggctgctgccgccacactgggctgcactgggttggtggcctataccggcggtctcaccccagtctggtgtttcccgggagccaccttcgccccctgaaccctaagactccaagccatctttcatttaggcctcctaggaaggtcgagcgaccagggagcgacccaaagcgtctctgtgcccatcgcccccccccccccccccaccgctccgctccacacttctgtgagcctgggtccccacccagctccgctcctgtgatccaggcctgccacctggcggccggggagggaggaacagggctcgtgcccagcacccctggttcctgcagagctggtagccaccgctgctgcagcagctgggcattcgccgaccttgctttactcagccccgacgtggatgggcaaactgctcagctcatccgatttcactttttcactctcccagccatcagttacaagccataagcatgagccccctatttccagggacatcccattcccatagtgatggatcagcaagacctctgccagcacacacggagtctttggcttcggacagcctcactcctgggggttgctgcaactccttccccgtgtacacgtctgcactctaacaacggagccacagctgcactcccccctcccccaaagcagtgtgggtatttattgatcttgttatctgactcactgacagactccgggacccacgttttagatgcattgagactcgacattcctcggtatttattgtctgtccccacctacgacctccactcccgacccttgcgaataaaatacttctggtctgccctaaaaaaaaaaaaaaaa

SEQ ID NO: 9 - RNA, 2611 nt, Mus musculus
  source 1..2611: mol_type = mRNA
  CDS 55..1872: protein_id = 878; translation = MSAEVRLRQLQQLVLDPGFLGLEPLLDLLLGVHQELGASHLAQDKY VADFLQWVEPIAARLKEVRLQRDDFEILKVIGRGAFSEVAVVKMKQTGQVYAMKIMNKW DMLKRGEVSCFREERDVLVKGDRRWITQLHFAFQDENYLYLVMEYYVGGDLLTLLSKFG ERIPAEMARFYLAEIVMAIDSVHRLGYVHRDIKPDNILLDRCGHIRLADFGSCLKLQPD GMVRSLVAVGTPDYLSPEILQAVGGGPGAGSYGPECDWWALGVFTYEMFYGQTPFYADS TAETYAKIVHYREHLSLPLADTVVPEEAQDLIRGLLCPAEIRLGRGGADFEGATDTCNF DVVEDRLTAMVSGGGETLSDMQEDMPLGVRLPFVGYSYCCMAFRDNQVPDPTPMELEAL QLPVSDLQGLDLQPPVSPPDQVAEEADLVAVPAPVAEAETTVTLQQLQEALEEEVLTRQ SLSRELEAIRTANQNFSSQLQEAEVRNRDLEAHVRQLQERMEMLQAPGAAAITGVPSPR ATDPPSHLDGPPAVAVGQCPLVGPGPMHRRHLLLPARIPRPGLSEARCLLLFAAALAAA ATLGCTGLVAYTGGLTPVWCFPGATFAP
cgggaagaccccgagctccggcccggggaggggccatggtgttgcctgcccaacatgtcagccgaagtgcggctgaggcagctccagcagctggtgctggacccaggcttcctgggactggagcccctgctcgaccttctcctgggcgtccaccaggagctgggtgcctctcacctagcccaggacaagtatgtggccgacttcttgcagtgggtggagcccattgcagcaaggcttaaggaggtccgactgcagagggatgattttgagattttgaaggtgatcgggcgtggggcgttcagcgaggtagcggtggtgaagatgaaacagacgggccaagtgtatgccatgaagattatgaataagtgggacatgctgaagagaggcgaggtgtcgtgcttccgggaagaaagggatgtattagtgaaaggggaccggcgctggatcacacagctgcactttgccttccaggatgagaactacctgtacctggtcatggaatactacgtgggcggggacctgctaacgctgctgagcaagtttggggagcggatccccgccgagatggctcgcttctacctggccgagattgtcatggccatagactccgtgcaccggctgggctacgtgcacagggacatcaaaccagataacattctgctggaccgatgtgggcacattcgcctggcagacttcggctcctgcctcaaactgcagcctgatggaatggtgaggtcgctggtggctgtgggcaccccggactacctgtctcctgagattctgcaggccgttggtggagggcctggggcaggcagctacgggccagagtgtgactggtgggcactgggcgtgttcacctatgagatgttctatgggcagacccccttctacgcggactccacagccgagacatatgccaagattgtgcactacagggaacacttgtcgctgccgctggcagacacagttgtccccgaggaagctcaggacctcattcgtgggctgctgtgtcctgctgagataaggctaggtcgaggtggggcagacttcgagggtgccacggacacatgcaatttcgatgtggtggaggaccggctcactgccatggtgagcgggggcggggagacgctgtcagacatgcaggaagacatgccccttggggtgcgcctgcccttcgtgggctactcctactgctgcatggccttcagagacaatcaggtcccggaccccacccctatggaactagaggccctgcagttgcctgtgtcagacttgcaagggcttgacttgcagcccccagtgtccccaccggatcaagtggctgaagaggctgacctagtggctgtccctgcccctgtggctgaggcagagaccacggtaacgctgcagcagctccaggaagccctggaagaagaggttctcacccggcagagcctgagccgcgagctggaggccatccggaccgccaaccagaacttctccagccaactacaggaggccgaggtccgaaaccgagacctggaggcgcatgttcggcagctacaggaacggatggagatgctgcaggccccaggagccgcagccatcacgggggtccccagtccccgggccacggatccaccttcccatctagatggccccccggccgtggctgtgggccagtgcccgctggtggggccaggccccatgcaccgccgtcacctgctgctccctgccaggatccctaggcctggcctatccgaggcgcgttgcctgctcctgttcgccgctgctctggctgctgccgccacactgggctgcactgggttggtggcctataccggcggtctcaccccagtctggtgtttcccgggagccaccttcgccccctgaaccctaagactccaagccatctttcatttaggcctcctaggaaggtcgagcgaccagggagcgacccaaagcgtctctgtgcccatcgcccccccccccccccccaccgctccgctccacacttctgtgagcctgggtccccacccagctccgctcctgtgatccaggcctgccacctggcggccggggagggaggaacagggctcgtgcccagcacccctggttcctgcagagctggtagccaccgctgctgcagcagctgggcattcgccgaccttgctttactcagccccgacgtggatgggcaaactgctcagctcatccgatttcactttttcactctcccagccatcagttacaagccataagcatgagccccctatttccagggacatcccattcccatagtgatggatcagcaagacctctgccagcacacacggagtctttggcttcggacagcctcactcctgggggttgctgcaactccttccccgtgtacacgtctgcactctaacaacggagccacagctgcactcccccctcccccaaagcagtgtgggtatttattgatcttgttatctgactcactgacagactccgggacccacgttttagatgcattgagactcgacattcctcggtatttattgtctgtccccacctacgacctccactcccgacccttgcgaataaaatacttctggtctgccctaaaaaaaaaaaaaaaaaaaaaaaa

SEQ ID NO: 10 - RNA, 988 nt, Mus musculus
  source 1..988: mol_type = mRNA
gctggaccggtccggaattctccggatcgccagcctttgtgggccatattcgtcatccctcctggcttctcatctgcttttgtggtcctagctcaagacctctaattcctctgctgacttaaatgcccttccccagaggtcttctcaggcctagtggacaagcttggagccttatctgctcctgcccaacattgagccaaagctccagcttaccccagcttccttacaatggaccccattgcagcaaggcttaaggaggtccgactgcagagggatgattttgagattttgaaggtgatcgggcgtggggcgttcagcgaggtagcggtggtgaagatgaaacagacgggccaagtgtatgccatgaagattatgaataagtgggacatgctgaagagaggcgaggtgtcgtgcttccgggaagaaagggatgtattagtgaaaggggaccggcgctggatcacacagctgcactttgccttccaggatgagaactacctgtacctggtcatggaatactacgtgggcggngacctgctaacgctgctgagcaagttttggggagcggatccccgccgagatggctcgcttctacctggccgagattgtcatggccatagactccgtgcaccggctgggctacgtgcacagggacatcaaaccagataacattctgctggaccgatgtgggcacattcgcctggcagacttcggctcctggcctcaactgcagcctgatggaatggtggagtcccctggtggctgtgggcacccccggactacctgtctcctgaaattctgcagggccttggtgggaggccctggggaaggcaactacgggccaaaagttggaaggggggggcctggggggggttcccctatgaaaagttctatggggaggaccccctttaagcggaatcccaggccgaaaaatatgcccangattgggccctaacagggaaaacttttcccctgcccctgggacaat

SEQ ID NO: 11 - RNA, 649 nt, Mus musculus
  source 1..649: mol_type = mRNA
ggcgtgttcgcctatgagatgttctatgggcagacccccttctacgcggactccacagccgagacatatgccaagattgtgcactacagggaacacttgtcgctgccgctggcagacacagttgtccccgaggaagctcaggacctcattcgtgggctgctgtgtcctgctgagataaggctaggtcgaggtggggcaggtgatttccagaaacatcctttcttctttggccttgattgggagggtctccgagacagtgtacccccctttacaccagacttcgagggtgccacggacacatgcaatttcgatgtggtggaggaccggctcactgccatggagacgctgtcagacatgcaggaagacatgccccttggggtgcgcctgcccttcgtgggctactcctactgctgcatggccttcagagacaatcaggtcccggaccccacccctatggaactagaggccctgcagttgcctgtgtcagacttgcaagggcttgacttgcagcccccagtgtccccaccggatcaagtggtcccaactctgatccccaccgacaggctgaagaggctgacctagtggctgtccctgcccctgtggctgaggcagagccacggtaacgctgcagcagctccaggaagccctg

SEQ ID NO: 12 - RNA, 527 nt, Mus musculus
  source 1..527: mol_type = mRNA
atttcgatgtggtggaggaccggctcactgccatggtgagcgggggcggggagacgctgtcagacatgcaggaagacatgccccttggggtgcgcctgcccttcgtgggctactcctactgctgcatggccttcagagacaatcaggtcccggaccccacccctatggaactagaggccctgcagttgcctgtgtcagacttgcaagggcttgacttgcagcccccagtgtccccaccggatcaagtggctgaagaggctgacctagtggctgtccctgcccctgtggctgaggcagagaccacggtaacgctgcagcagctccaggaagccctggaagaagaggttctcacccggcagagcctgagccgcgagctggaggccatccggaccgccaaccagaacttctccaggaggccgaggtccgaaaccgagacctggaggcgcatgttcggcagctacaggaacggatggagatgctgcaggccccaggaaccgcagccatcacgggggtccccagtcccccgg

SEQ ID NO: 13 - RNA, 567 nt, Mus musculus
  source 1..567: mol_type = mRNA
atggtgaggtcgctggtggctgtgggcaccccggactacctgtctcctgagattctgcaggccgttggtggagggcctggggcaggcagctacgggccagagtgtgactggtgggcactgggcgtgttcgcctatgagatgttctatgggcagacccccttctacgcggactccacagccgagacatatgccaagattgtgcactacagggaacacttgtcgctgccgctggcagacacagttgtccccgaggaagctcaggacctcattcgtgggctgctgtgtcctgctgagataaggctaggtcgaggtggggcaggtgatttccagaaacatcctttcttctttggccttgattgggagggtctccgagacagtgtacccccctttacaccagacttcgagggtgccacggacacatgcaatttcgatgtggtggaggaccggctcactgccatggtgagcgggggcggggtatgaggacacacaggtgaccagtccccaagacagtgagtgaggcttcactcttggcagtactaaaattgaatgtagggggctgggctcttg

SEQ ID NO: 14 - RNA, 2474 nt, Mus musculus
  source 1..2474: mol_type = mRNA
ccgggaagaaagggatgtattagtgaaaggggaccggcgctggatcacacagctgcactttgccttccaggatgagaactacctgtacctggtcatggaatactacgtgggcggggacctgctaacgctgctgagcaagtttggggagcggatccccgccgagatggctcgcttctacctggccgagattgtcatggccatagactccgtgcaccggctgggctacgtgcacagggacatcaaaccagataacattctgctggaccgatgtgggcacattcgcctggcagacttcggctcctgcctcaaactgcagcctgatggaatggtgaggtcgctggtggctgtgggcaccccggactacctgtctcctgagattctgcaggccgttggtggagggcctggggcaggcagctacgggccagagtgtgactggtgggcactgggcgtgttcgcctatgagatgttctatgggcagacccccttctacgcggactccacagccgagacatatgccaagattgtgcactacagggaacacttgtcgctgccgctggcagacacagttgtccccgaggaagctcaggacctcattcgtgggctgctgtgtcctgctgagataaggctaggtcgagacttcgagggtgccacggacacatgcaatttcgatgtggtggaggaccggctcactgccatggtgagcgggggcggggagacgctgtcagacatgcaggaagacatgccccttggggtgcgcctgcccttcgtgggctactcctactgctgcatggccttcagagacaatcaggtcccggaccccacccctatggaactagaggccctgcagttgcctgtgtcagacttgcaagggcttgacttgcagcccccagtgtccccaccggatcaagtggctgaagaggccgacctagtggctgtccctgcccctgtggctgaggcagagaccacggtaacgctgcagcagctccaggaagccctggaagaagaggttctcacccggcagagcctgagccgcgagctggaggccatccggaccgccaaccagaacttctccagccaactacaggaggccgaggtccgaaaccgagacctggaggcgcatgttcggcagctacaggaacggatggagatgctgcaggccccaggagccgcaggcgagtccctcacctgcttccagccaagggggcactgggtggagatggggggcatgttgggtgtgtgaaccctcggggcaggggaggagtccaggctggggcaccgcagccgcgccactgcctttctcctccatcctccacactccatacacctctctcttctccttccagccatcacgggggtccccagtccccgggccacggatccaccttcccatgcttctcgccaaatcctccccaagggaactccctagactcccgttctggcctcgactagattcccgcactgcctctcgccctgctgctgggctccgatcgggtcacctgtcccttctctctccagctagatggccccccggccgtggctgtgggccagtgcccgctggtggggccaggccccatgcaccgccgtcacctgctgctccctgccaggatccctaggcctggcctatccgaggcgcgttgcctgctcctgttcgccgctgctctggctgctgccgccacactgggctgcactgggttggtggcctataccggcggtctcaccccagtctggtgtttcccgggagccaccttcgccccctgaaccctaagactccaagccatctttcatttaggcctcctaggaagatcgagcgaccagggagcgacccaaagcgtctctgtgcccatcgcccccccccccccccccaccgctccgctccacacttctgtgagcctgggtccccacccagctccgctcctgtgatccaggcctgccacctggcggccggggagggaggaacagggctcgtgcccagcacccctggttcctgcagagctggtagccaccgctgctgcagcagctgggcattcgccgaccttgctttactcagccctgacgtggatgggctaactgctcagctcatccgatttcactttttcactctcccagccatcagttacaagccataagcatgagccccctatttccagggacatcccattcccatagtgatggatcagcaagacctctgccagcacacacggagtctttggcttcggacagcctcactcctgggggttgctgcaactccttccccgtgtacacgtctgcactctaacaacggagccacagctgcactcccccctcccccaaagcagtgtgggtatttattgatcttgttatctgactcactgacagactccgggacccacgttttagatgcattgagactcgacattcctcggtatttattgtctgtccccacctacgacctccactcccgacccttgcgaataaaatacttctggtctgcccta

SEQ ID NO: 15 - RNA, 2135 nt, Mus musculus
  source 1..2135: mol_type = mRNA
ccgggaagaaagggatgtattagtgaaaggggaccggcgctggatcacacagctgcactttgccttccaggatgagaactacctgtacctggtcatggaatactacgtgggcggggacctgctaacgctgctgagcaagtttggggagcggatccccgccgagatggctcgcttctacctggccgagattgtcatggccatagactccgtgcaccggctgggctacgtgcacagggacatcaaaccagataacattctgctggaccgatgtgggcacattcgcctggcagacttcggctcctgcctcaaactgcagcctgatggaatggtgaggtcgctggtggctgtgggcaccccggactacctgtctcctgagattctgcaggccgttggtggagggcctggggcaggcagctacgggccagagtgtgactggtgggcactgggcgtgttcgcctatgagatgttctatgggcagacccccttctacgcggactccacagccgagacatatgccaagattgtgcactacagggaacacttgtcgctgccgctggcagacacagttgtccccgaggaagctcaggacctcattcgtgggctgctgtgtcctgctgagataaggctaggtcgaggtggggcaggtgatttccagaaacatcctttcttctttggccttgattgggagggtctccgagacagtgtacccccctttacaccagacttcgagggtgccacggacacatgcaatttcgatgtggtggaggaccggctcactgccatggagacgctgtcagacatgcaggaagacatgccccttggggtgcgcctgcccttcgtgggctactcctactgctgcatggccttcagagctgaagaggccgacctagtggctgtccctgcccctgtggctgaggcagagaccacggtaacgctgcagcagctccaggaagccctggaagaagaggttctcacccggcagagcctgagccgcgagctggaggccatccggaccgccaaccagaacttctccagccaactacaggaggccgaggtccgaaaccgagacctggaggcgcatgttcggcagctacaggaacggatggagatgctgcaggccccaggagccgcagccatcacgggggtccccagtccccgggccacggatccaccttcccatatggccccccggccgtggctgtgggccagtgcccgctggtggggccaggccccatgcaccgccgtcacctgctgctccctgccaggatccctaggcctggcctatccgaggcgcgttgcctgctcctgttcgccgctgctctggctgctgccgccacactgggctgcactgggttggtggcctataccggcggtctcaccccagtctggtgtttcccgggagccaccttcgccccctgaaccctaagactccaagccatctttcatttaggcctcctaggaagatcgagcgaccagggagcgacccaaagcgtctctgtgcccatcgcccccccccccccccccaccgctccgctccacacttctgtgagcctgggtccccacccagctccgctcctgtgatccaggcctgccacctggcggccggggagggaggaacagggctcgtgcccagcacccctggttcctgcagagctggtagccaccgctgctgcagcagctgggcattcgccgaccttgctttactcagccctgacgtggatgggctaactgctcagctcatccgatttcactttttcactctcccagccatcagttacaagccataagcatgagccccctatttccagggacatcccattcccatagtgatggatcagcaagacctctgccagcacacacggagtctttggcttcggacagcctcactcctgggggttgctgcaactccttccccgtgtacacgtctgcactctaacaacggagccacagctgcactcccccctcccccaaagcagtgtgggtatttattgatcttgttatctgactcactgacagactccgggacccacgttttagatgcattgagactcgacattcctcggtatttattgtctgtccccacctacgacctccactcccgacccttgcgaataaaatacttctggtctgcccta

SEQ ID NO: 16 - RNA, 2873 nt, Homo sapiens
  source 1..2873: mol_type = mRNA
  CDS 206..2083: protein_id = 879; translation = MSAEVRLRRLQQLVLDPGFLGLEPLLDLLLGVHQELGASELAQDKY VADFLQWAEPIVVRLKEVRLQRDDFEILKVIGRGAFSEVAVVKMKQTGQVYAMKIMNKW DMLKRGEVSCFREERDVLVNGDRRWITQLHFAFQDENYLYLVMEYYVGGDLLTLLSKFG ERIPAEMARFYLAEIVMAIDSVHRLGYVHRDIKPDNILLDRCGHIRLADFGSCLKLRAD GTVRSLVAVGTPDYLSPEILQAVGGGPGTGSYGPECDWWALGVFAYEMFYGQTPFYADS TAETYGKIVHYKEHLSLPLVDEGVPEEARDFIQRLLCPPETRLGRGGAGDFRTHPFFFG LDWDGLRDSVPPFTPDFEGATDTCNFDLVEDGLTAMETLSDIREGAPLGVHLPFVGYSY SCMALRDSEVPGPTPMELEAEQLLEPHVQAPSLEPSVSPQDETAEVAVPAAVPAAEAEA EVTLRELQEALEEEVLTRQSLSREMEAIRTDNQNFASQLREAEARNRDLEAHVRQLQER MELLQAEGATAVTGVPSPRATDPPSHMAPRPWLWASARWWGQAPCTAATCCSLPGSLGL AYRRRFPCSCSPLFCLVPPPWAALGWWPTPANSPQSGAAQEPPALPEP
aggggggctggaccaaggggtggggagaaggggaggaggcctcggccggccgcagagagaagtggccagagaggcccaggggacagccagggacaggcagacatgcagccagggctccagggcctggacaggggctgccaggccctgtgacaggaggaccccgagcccccggcccggggaggggccatggtgctgcctgtccaacatgtcagccgaggtgcggctgaggcggctccagcagctggtgttggacccgggcttcctggggctggagcccctgctcgaccttctcctgggcgtccaccaggagctgggcgcctccgaactggcccaggacaagtacgtggccgacttcttgcagtgggcggagcccatcgtggtgaggcttaaggaggtccgactgcagagggacgacttcgagattctgaaggtgatcggacgcggggcgttcagcgaggtagcggtagtgaagatgaagcagacgggccaggtgtatgccatgaagatcatgaacaagtgggacatgctgaagaggggcgaggtgtcgtgcttccgtgaggagagggacgtgttggtgaatggggaccggcggtggatcacgcagctgcacttcgccttccaggatgagaactacctgtacctggtcatggagtattacgtgggcggggacctgctgacactgctgagcaagtttggggagcggattccggccgagatggcgcgcttctacctggcggagattgtcatggccatagactcggtgcaccggcttggctacgtgcacagggacatcaaacccgacaacatcctgctggaccgctgtggccacatccgcctggccgacttcggctcttgcctcaagctgcgggcagatggaacggtgcggtcgctggtggctgtgggcaccccagactacctgtcccccgagatcctgcaggctgtgggcggtgggcctgggacaggcagctacgggcccgagtgtgactggtgggcgctgggtgtattcgcctatgaaatgttctatgggcagacgcccttctacgcggattccacggcggagacctatggcaagatcgtccactacaaggagcacctctctctgccgctggtggacgaaggggtccctgaggaggctcgagacttcattcagcggttgctgtgtcccccggagacacggctgggccggggtggagcaggcgacttccggacacatcccttcttctttggcctcgactgggatggtctccgggacagcgtgcccccctttacaccggatttcgaaggtgccaccgacacatgcaacttcgacttggtggaggacgggctcactgccatggagacactgtcggacattcgggaaggtgcgccgctaggggtccacctgccttttgtgggctactcctactcctgcatggccctcagggacagtgaggtcccaggccccacacccatggaactggaggccgagcagctgcttgagccacacgtgcaagcgcccagcctggagccctcggtgtccccacaggatgaaacagctgaagtggcagttccagcggctgtccctgcggcagaggctgaggccgaggtgacgctgcgggagctccaggaagccctggaggaggaggtgctcacccggcagagcctgagccgggagatggaggccatccgcacggacaaccagaacttcgccagtcaactacgcgaggcagaggctcggaaccgggacctagaggcacacgtccggcagttgcaggagcggatggagttgctgcaggcagagggagccacagctgtcacgggggtccccagtccccgggccacggatccaccttcccatatggccccccggccgtggctgtgggccagtgcccgctggtggggccaggccccatgcaccgccgccacctgctgctccctgccagggtccctaggcctggcctatcggaggcgctttccctgctcctgttcgccgttgttctgtctcgtgccgccgccctgggctgcattgggttggtggcccacgccggccaactcaccgcagtctggcgccgcccaggagccgcccgcgctccctgaaccctagaactgtcttcgactccggggccccgttggaagactgagtgcccggggcacggcacagaagccgcgcccaccgcctgccagttcacaaccgctccgagcgtgggtctccgcccagctccagtcctgtgatccgggcccgccccctagcggccggggagggaggggccgggtccgcggccggcgaacggggctcgaagggtccttgtagccgggaatgctgctgctgctgctgctgctgctgctgctgctgctgctgctgctgctgctgctgctgctggggggatcacagaccatttctttctttcggccaggctgaggccctgacgtggatgggcaaactgcaggcctgggaaggcagcaagccgggccgtccgtgttccatcctccacgcacccccacctatcgttggttcgcaaagtgcaaagctttcttgtgcatgacgccctgctctggggagcgtctggcgcgatctctgcctgcttactcgggaaatttgcttttgccaaacccgctttttcggggatcccgcgcccccctcctcacttgcgctgctctcggagccccagccggctccgcccgcttcggcggtttggatatttattgacctcgtcctccgactcgctgacaggctacaggacccccaacaaccccaatccacgttttggatgcactgagaccccgacattcctcggtatttattgtctgtccccacctaggacccccacccccgaccctcgcgaataaaaggccctccatctgcccaaaaaaaaaaaaaaaaaaaaaaaaaaaaa

SEQ ID NO: 17 - RNA, 1509 nt, Homo sapiens
  source 1..1509: mol_type = mRNA
  CDS 106..1239: protein_id = 880; translation = MCDEDETTALVCDNGSGLVKAGFAGDDAPRAVFPSIVGRPRHQGVM VGMGQKDSYVGDEAQSKRGILTLKYPIEHGIITNWDDMEKIWHHTFYNELRVAPEEHPT LLTEAPLNPKANREKMTQIMFETFNVPAMYVAIQAVLSLYASGRTTGIVLDSGDGVTHN VPIYEGYALPHAIMRLDLAGRDLTDYLMKILTERGYSFVTTAEREIVRDIKEKLCYVAL DFENEMATAASSSSLEKSYELPDGQVITIGNERFRCPETLFQPSFIGMESAGIHETTYN SIMKCDIDIRKDLYANNVMSGGTTMYPGIADRMQKEITALAPSTMKIKIIAPPERKYSV WIGGSILASLSTFQQMWITKQEYDEAGPSIVHRKCF
ccaccgcagcggacagcgccaagtgaagcctcgcttcccctccgcggcgaccagggcccgagccgagagtagcagttgtagctacccgcccagaaactagacacaatgtgcgacgaagacgagaccaccgccctcgtgtgcgacaatggctccggcctggtgaaagccggcttcgccggggatgacgcccctagggccgtgttcccgtccatcgtgggccgcccccgacaccagggcgtcatggtcggtatgggtcagaaagattcctacgtgggcgacgaggctcagagcaagagaggtatcctgaccctgaagtaccctatcgagcacggcatcatcaccaactgggatgacatggagaagatctggcaccacaccttctacaacgagcttcgcgtggctcccgaggagcaccccaccctgctcaccgaggcccccctcaatcccaaggccaaccgcgagaagatgacccagatcatgtttgagaccttcaacgtgcccgccatgtacgtggccatccaggccgtgctgtccctctacgcctccggcaggaccaccggcatcgtgctggactccggcgacggcgtcacccacaacgtgcccatttatgagggctacgcgctgccgcacgccatcatgcgcctggacctggcgggccgcgatctcaccgactacctgatgaagatcctcactgagcgtggctactccttcgtgaccacagctgagcgcgagatcgtgcgcgacatcaaggagaagctgtgctacgtggccctggacttcgagaacgagatggcgacggccgcctcctcctcctccctggaaaagagctacgagctgccagacgggcaggtcatcaccatcggcaacgagcgcttccgctgcccggagacgctcttccagccctccttcatcggtatggagtcggcgggcattcacgagaccacctacaacagcatcatgaagtgtgacatcgacatcaggaaggacctgtatgccaacaacgtcatgtcggggggcaccacgatgtaccctgggatcgctgaccgcatgcagaaagagatcaccgcgctggcacccagcaccatgaagatcaagatcatcgccccgccggagcgcaaatactcggtgtggatcggcggctccatcctggcctcgctgtccaccttccagcagatgtggatcaccaagcaggagtacgacgaggccggcccttccatcgtccaccgcaaatgcttctagacacactccacctccagcacgcgacttctcaggacgacgaatcttctcaatgggggggcggctgagctccagccaccccgcagtcactttctttgtaacaacttccgttgctgccatcgtaaactgacacagtgtttataacgtgtacatacattaacttattacctcattttgttatttttcgaaacaaagccctgtggaagaaaatggaaaacttgaagaagcattaaagtcattctgttaagctgcgtaaaaaaaaaaaaaaaaaaa

SEQ ID NO: 18-19 - skipped (2 entries)

SEQ ID NO: 20 - DNA, 18 bp, synthetic construct
  source 1..18: mol_type = other DNA
agcctgagccgggagatg

SEQ ID NO: 21 - DNA, 21 bp, synthetic construct
  source 1..21: mol_type = other DNA
gcgtagttgactggcgaagtt

SEQ ID NO: 22 - DNA, 21 bp, synthetic construct
  source 1..21: mol_type = other DNA
aggccatccgcacggacaacc

SEQ ID NO: 23 - DNA, 16 bp, synthetic construct
  source 1..16: mol_type = other DNA
acaataaataccgagg

SEQ ID NO: 24 - DNA, 20 bp, synthetic construct
  source 1..20: mol_type = other DNA
cggagcggttgtgaactggc

SEQ ID NO: 25 - DNA, 20 bp, synthetic construct
  source 1..20: mol_type = other DNA
gcgcaccttcccgaatgtcc

SEQ ID NO: 26 - DNA, 16 bp, synthetic construct
  source 1..16: mol_type = other DNA
cccgaatgtccgacag

SEQ ID NO: 27 - DNA, 17 bp, synthetic construct
  source 1..17: mol_type = other DNA
cggagcggttgtgaact

SEQ ID NO: 28 - DNA, 17 bp, synthetic construct
  source 1..17: mol_type = other DNA
acaataaataccgagga

SEQ ID NO: 29 - DNA, 16 bp, synthetic construct
  source 1..16: mol_type = other DNA
gacaatctccgccagg

SEQ ID NO: 30 - DNA, 16 bp, synthetic construct
  source 1..16: mol_type = other DNA
tcccgaatgtccgaca

SEQ ID NO: 31 - DNA, 16 bp, synthetic construct
  source 1..16: mol_type = other DNA
tgtaatgttgtccagt

SEQ ID NO: 32 - DNA, 16 bp, synthetic construct
  source 1..16: mol_type = other DNA
gtgtaatgttgtccag

SEQ ID NO: 33 - DNA, 20 bp, synthetic construct
  source 1..20: mol_type = other DNA
ttgcactttgcgaaccaacg

SEQ ID NO: 34 - DNA, 20 bp, synthetic construct
  source 1..20: mol_type = other DNA
cgacacctcgcccctcttca

SEQ ID NO: 35 - DNA, 20 bp, synthetic construct
  source 1..20: mol_type = other DNA
acgacacctcgcccctcttc

SEQ ID NO: 36 - DNA, 20 bp, synthetic construct
  source 1..20: mol_type = other DNA
cacgacacctcgcccctctt

SEQ ID NO: 37 - DNA, 20 bp, synthetic construct
  source 1..20: mol_type = other DNA
gcacgacacctcgcccctct

SEQ ID NO: 38 - DNA, 20 bp, synthetic construct
  source 1..20: mol_type = other DNA
agcacgacacctcgcccctc

SEQ ID NO: 39 - DNA, 20 bp, synthetic construct
  source 1..20: mol_type = other DNA
aagcacgacacctcgcccct

SEQ ID NO: 40 - DNA, 20 bp, synthetic construct
  source 1..20: mol_type = other DNA
gaagcacgacacctcgcccc

SEQ ID NO: 41 - DNA, 20 bp, synthetic construct
  source 1..20: mol_type = other DNA
ggaagcacgacacctcgccc

SEQ ID NO: 42 - DNA, 20 bp, synthetic construct
  source 1..20: mol_type = other DNA
cggaagcacgacacctcgcc

SEQ ID NO: 43 - DNA, 20 bp, synthetic construct
  source 1..20: mol_type = other DNA
acggaagcacgacacctcgc

SEQ ID NO: 44 - DNA, 20 bp, synthetic construct
  source 1..20: mol_type = other DNA
cacggaagcacgacacctcg

SEQ ID NO: 45 - DNA, 20 bp, synthetic construct
  source 1..20: mol_type = other DNA
tcacggaagcacgacacctc

SEQ ID NO: 46 - DNA, 20 bp, synthetic construct
  source 1..20: mol_type = other DNA
ctcacggaagcacgacacct

SEQ ID NO: 47 - DNA, 20 bp, synthetic construct
  source 1..20: mol_type = other DNA
cctcacggaagcacgacacc

SEQ ID NO: 48 - DNA, 20 bp, synthetic construct
  source 1..20: mol_type = other DNA
tcctcacggaagcacgacac

SEQ ID NO: 49 - DNA, 20 bp, synthetic construct
  source 1..20: mol_type = other DNA
ctcctcacggaagcacgaca

SEQ ID NO: 50 - DNA, 20 bp, synthetic construct
  source 1..20: mol_type = other DNA
tctcctcacggaagcacgac

SEQ ID NO: 51 - DNA, 20 bp, synthetic construct
  source 1..20: mol_type = other DNA
ctctcctcacggaagcacga

SEQ ID NO: 52 - DNA, 20 bp, synthetic construct
  source 1..20: mol_type = other DNA
cctctcctcacggaagcacg

SEQ ID NO: 53 - DNA, 20 bp, synthetic construct
  source 1..20: mol_type = other DNA
ccctctcctcacggaagcac

SEQ ID NO: 54 - DNA, 20 bp, synthetic construct
  source 1..20: mol_type = other DNA
tccctctcctcacggaagca

SEQ ID NO: 55 - DNA, 20 bp, synthetic construct
  source 1..20: mol_type = other DNA
gtccctctcctcacggaagc

SEQ ID NO: 56 - DNA, 20 bp, synthetic construct
  source 1..20: mol_type = other DNA
cgtccctctcctcacggaag

SEQ ID NO: 57 - DNA, 20 bp, synthetic construct
  source 1..20: mol_type = other DNA
ggtccccattcaccaacacg

SEQ ID NO: 58 - DNA, 20 bp, synthetic construct
  source 1..20: mol_type = other DNA
cggtccccattcaccaacac

SEQ ID NO: 59 - DNA, 20 bp, synthetic construct
  source 1..20: mol_type = other DNA
ccggtccccattcaccaaca

SEQ ID NO: 60 - DNA, 20 bp, synthetic construct
  source 1..20: mol_type = other DNA
gccggtccccattcaccaac

SEQ ID NO: 61 - DNA, 20 bp, synthetic construct
  source 1..20: mol_type = other DNA
cgccggtccccattcaccaa

SEQ ID NO: 62 - DNA, 20 bp, synthetic construct
  source 1..20: mol_type = other DNA
ccgccggtccccattcacca

SEQ ID NO: 63 - DNA, 20 bp, synthetic construct
  source 1..20: mol_type = other DNA
accgccggtccccattcacc

SEQ ID NO: 64 - DNA, 20 bp, synthetic construct
  source 1..20: mol_type = other DNA
caccgccggtccccattcac

SEQ ID NO: 65 - DNA, 20 bp, synthetic construct
  source 1..20: mol_type = other DNA
ccaccgccggtccccattca

SEQ ID NO: 66 - DNA, 20 bp, synthetic construct
  source 1..20: mol_type = other DNA
tccaccgccggtccccattc

SEQ ID NO: 67 - DNA, 20 bp, synthetic construct
  source 1..20: mol_type = other DNA
atccaccgccggtccccatt

SEQ ID NO: 68 - DNA, 20 bp, synthetic construct
  source 1..20: mol_type = other DNA
gatccaccgccggtccccat

SEQ ID NO: 69 - DNA, 20 bp, synthetic construct
  source 1..20: mol_type = other DNA
tgatccaccgccggtcccca

SEQ ID NO: 70 - DNA, 20 bp, synthetic construct
  source 1..20: mol_type = other DNA
gtgatccaccgccggtcccc

SEQ ID NO: 71 - DNA, 20 bp, synthetic construct
  source 1..20: mol_type = other DNA
cgtgatccaccgccggtccc

SEQ ID NO: 72 - DNA, 20 bp, synthetic construct
  source 1..20: mol_type = other DNA
ttctcatcctggaaggcgaa

SEQ ID NO: 73 - DNA, 20 bp, synthetic construct
  source 1..20: mol_type = other DNA
gttctcatcctggaaggcga

SEQ ID NO: 74 - DNA, 20 bp, synthetic construct
  source 1..20: mol_type = other DNA
agttctcatcctggaaggcg

SEQ ID NO: 75 - DNA, 20 bp, synthetic construct
  source 1..20: mol_type = other DNA
gtagttctcatcctggaagg

SEQ ID NO: 76 - DNA, 20 bp, synthetic construct
  source 1..20: mol_type = other DNA
ggtagttctcatcctggaag

SEQ ID NO: 77 - DNA, 20 bp, synthetic construct
  source 1..20: mol_type = other DNA
aggtagttctcatcctggaa

SEQ ID NO: 78 - DNA, 20 bp, synthetic construct
  source 1..20: mol_type = other DNA
caggtagttctcatcctgga

SEQ ID NO: 79 - DNA, 20 bp, synthetic construct
  source 1..20: mol_type = other DNA
tacaggtagttctcatcctg

SEQ ID NO: 80 - DNA, 20 bp, synthetic construct
  source 1..20: mol_type = other DNA
gtacaggtagttctcatcct

SEQ ID NO: 81 - DNA, 20 bp, synthetic construct
  source 1..20: mol_type = other DNA
ggtacaggtagttctcatcc

SEQ ID NO: 82 - DNA, 20 bp, synthetic construct
  source 1..20: mol_type = other DNA
aggtacaggtagttctcatc

SEQ ID NO: 83 - DNA, 20 bp, synthetic construct
  source 1..20: mol_type = other DNA
ccaggtacaggtagttctca

SEQ ID NO: 84 - DNA, 20 bp, synthetic construct
  source 1..20: mol_type = other DNA
accaggtacaggtagttctc

SEQ ID NO: 85 - DNA, 20 bp, synthetic construct
  source 1..20: mol_type = other DNA
gaccaggtacaggtagttct

SEQ ID NO: 86 - DNA, 20 bp, synthetic construct
  source 1..20: mol_type = other DNA
tgaccaggtacaggtagttc

SEQ ID NO: 87 - DNA, 20 bp, synthetic construct
  source 1..20: mol_type = other DNA
catgaccaggtacaggtagt

SEQ ID NO: 88 - DNA, 20 bp, synthetic construct
  source 1..20: mol_type = other DNA
ccatgaccaggtacaggtag

SEQ ID NO: 89 - DNA, 20 bp, synthetic construct
  source 1..20: mol_type = other DNA
tccatgaccaggtacaggta

SEQ ID NO: 90 - DNA, 20 bp, synthetic construct
  source 1..20: mol_type = other DNA
ctccatgaccaggtacaggt

SEQ ID NO: 91 - DNA, 20 bp, synthetic construct
  source 1..20: mol_type = other DNA
actccatgaccaggtacagg

SEQ ID NO: 92 - DNA, 20 bp, synthetic construct
  source 1..20: mol_type = other DNA
tactccatgaccaggtacag

SEQ ID NO: 93 - DNA, 20 bp, synthetic construct
  source 1..20: mol_type = other DNA
atactccatgaccaggtaca

SEQ ID NO: 94 - DNA, 20 bp, synthetic construct
  source 1..20: mol_type = other DNA
aatactccatgaccaggtac

SEQ ID NO: 95 - DNA, 20 bp, synthetic construct
  source 1..20: mol_type = other DNA
taatactccatgaccaggta

SEQ ID NO: 96 - DNA, 20 bp, synthetic construct
  source 1..20: mol_type = other DNA
cgtaatactccatgaccagg

SEQ ID NO: 97 - DNA, 20 bp, synthetic construct
  source 1..20: mol_type = other DNA
agcagtgtcagcaggtcccc

SEQ ID NO: 98 - DNA, 20 bp, synthetic construct
  source 1..20: mol_type = other DNA
cagcagtgtcagcaggtccc

SEQ ID NO: 99 - DNA, 20 bp, synthetic construct
  source 1..20: mol_type = other DNA
tcagcagtgtcagcaggtcc

SEQ ID NO: 100 - DNA, 20 bp, synthetic construct
  source 1..20: mol_type = other DNA
ctcagcagtgtcagcaggtc

SEQ ID NO: 101 - DNA, 20 bp, synthetic construct
  source 1..20: mol_type = other DNA
gctcagcagtgtcagcaggt

SEQ ID NO: 102 - DNA, 20 bp, synthetic construct
  source 1..20: mol_type = other DNA
tgctcagcagtgtcagcagg

SEQ ID NO: 103 - DNA, 20 bp, synthetic construct
  source 1..20: mol_type = other DNA
ttgctcagcagtgtcagcag

SEQ ID NO: 104 - DNA, 20 bp, synthetic construct
  source 1..20: mol_type = other DNA
cttgctcagcagtgtcagca

SEQ ID NO: 105 - DNA, 20 bp, synthetic construct
  source 1..20: mol_type = other DNA
acttgctcagcagtgtcagc

SEQ ID NO: 106 - DNA, 20 bp, synthetic construct
  source 1..20: mol_type = other DNA
aacttgctcagcagtgtcag

SEQ ID NO: 107 - DNA, 20 bp, synthetic construct
  source 1..20: mol_type = other DNA
aaacttgctcagcagtgtca

SEQ ID NO: 108 - DNA, 20 bp, synthetic construct
  source 1..20: mol_type = other DNA
caaacttgctcagcagtgtc

SEQ ID NO: 109 - DNA, 20 bp, synthetic construct
  source 1..20: mol_type = other DNA
ccaaacttgctcagcagtgt

SEQ ID NO: 110 - DNA, 20 bp, synthetic construct
  source 1..20: mol_type = other DNA
cccaaacttgctcagcagtg

SEQ ID NO: 111 - DNA, 20 bp, synthetic construct
  source 1..20: mol_type = other DNA
gtgagcccgtcctccaccaa

SEQ ID NO: 112 - DNA, 20 bp, synthetic construct
  source 1..20: mol_type = other DNA
agtgagcccgtcctccacca

SEQ ID NO: 113 - DNA, 20 bp, synthetic construct
  source 1..20: mol_type = other DNA
cagtgagcccgtcctccacc

SEQ ID NO: 114 - DNA, 20 bp, synthetic construct
  source 1..20: mol_type = other DNA
gcagtgagcccgtcctccac

SEQ ID NO: 115 - DNA, 20 bp, synthetic construct
  source 1..20: mol_type = other DNA
ggcagtgagcccgtcctcca

SEQ ID NO: 116 - DNA, 20 bp, synthetic construct
  source 1..20: mol_type = other DNA
tggcagtgagcccgtcctcc

SEQ ID NO: 117 - DNA, 20 bp, synthetic construct
  source 1..20: mol_type = other DNA
catggcagtgagcccgtcct

SEQ ID NO: 118 - DNA, 20 bp, synthetic construct
  source 1..20: mol_type = other DNA
ccatggcagtgagcccgtcc

SEQ ID NO: 119 - DNA, 20 bp, synthetic construct
  source 1..20: mol_type = other DNA
tccatggcagtgagcccgtc

SEQ ID NO: 120 - DNA, 20 bp, synthetic construct
  source 1..20: mol_type = other DNA
ctccatggcagtgagcccgt

SEQ ID NO: 121 - DNA, 20 bp, synthetic construct
  source 1..20: mol_type = other DNA
tctccatggcagtgagcccg

SEQ ID NO: 122 - DNA, 20 bp, synthetic construct
  source 1..20: mol_type = other DNA
gtctccatggcagtgagccc

SEQ ID NO: 123 - DNA, 20 bp, synthetic construct
  source 1..20: mol_type = other DNA
ccttcccgaatgtccgacag

SEQ ID NO: 124 - DNA, 20 bp, synthetic construct
  source 1..20: mol_type = other DNA
accttcccgaatgtccgaca

SEQ ID NO: 125 - DNA, 20 bp, synthetic construct
  source 1..20: mol_type = other DNA
caccttcccgaatgtccgac

SEQ ID NO: 126 - DNA, 20 bp, synthetic construct
  source 1..20: mol_type = other DNA
gcaccttcccgaatgtccga

SEQ ID NO: 127 - DNA, 20 bp, synthetic construct
  source 1..20: mol_type = other DNA
cgcaccttcccgaatgtccg

SEQ ID NO: 128 - DNA, 20 bp, synthetic construct
  source 1..20: mol_type = other DNA
ggcgcaccttcccgaatgtc

SEQ ID NO: 129 - DNA, 20 bp, synthetic construct
  source 1..20: mol_type = other DNA
acaaaaggcaggtggacccc

SEQ ID NO: 130 - DNA, 20 bp, synthetic construct
  source 1..20: mol_type = other DNA
cacaaaaggcaggtggaccc

SEQ ID NO: 131 - DNA, 20 bp, synthetic construct
  source 1..20: mol_type = other DNA
ccacaaaaggcaggtggacc

SEQ ID NO: 132 - DNA, 20 bp, synthetic construct
  source 1..20: mol_type = other DNA
cccacaaaaggcaggtggac

SEQ ID NO: 133 - DNA, 20 bp, synthetic construct
  source 1..20: mol_type = other DNA
gcccacaaaaggcaggtgga

SEQ ID NO: 134 - DNA, 20 bp, synthetic construct
  source 1..20: mol_type = other DNA
agcccacaaaaggcaggtgg

SEQ ID NO: 135 - DNA, 20 bp, synthetic construct
  source 1..20: mol_type = other DNA
tagcccacaaaaggcaggtg

SEQ ID NO: 136 - DNA, 20 bp, synthetic construct
  source 1..20: mol_type = other DNA
gtagcccacaaaaggcaggt

SEQ ID NO: 137 - DNA, 20 bp, synthetic construct
  source 1..20: mol_type = other DNA
agtagcccacaaaaggcagg

SEQ ID NO: 138 - DNA, 20 bp, synthetic construct
  source 1..20: mol_type = other DNA
gagtagcccacaaaaggcag

SEQ ID NO: 139 - DNA, 20 bp, synthetic construct
  source 1..20: mol_type = other DNA
ggagtagcccacaaaaggca

SEQ ID NO: 140 - DNA, 20 bp, synthetic construct
  source 1..20: mol_type = other DNA
aggagtagcccacaaaaggc

SEQ ID NO: 141 - DNA, 20 bp, synthetic construct
  source 1..20: mol_type = other DNA
taggagtagcccacaaaagg

SEQ ID NO: 142 - DNA, 20 bp, synthetic construct
  source 1..20: mol_type = other DNA
gtaggagtagcccacaaaag

SEQ ID NO: 143 - DNA, 20 bp, synthetic construct
  source 1..20: mol_type = other DNA
agtaggagtagcccacaaaa

SEQ ID NO: 144 - DNA, 20 bp, synthetic construct
  source 1..20: mol_type = other DNA
gagtaggagtagcccacaaa

SEQ ID NO: 145 - DNA, 20 bp, synthetic construct
  source 1..20: mol_type = other DNA
ggagtaggagtagcccacaa

SEQ ID NO: 146 - DNA, 20 bp, synthetic construct
  source 1..20: mol_type = other DNA
aggagtaggagtagcccaca

SEQ ID NO: 147 - DNA, 20 bp, synthetic construct
  source 1..20: mol_type = other DNA
caggagtaggagtagcccac

SEQ ID NO: 148 - DNA, 20 bp, synthetic construct
  source 1..20: mol_type = other DNA
gcaggagtaggagtagccca

SEQ ID NO: 149 - DNA, 20 bp, synthetic construct
  source 1..20: mol_type = other DNA
tgcaggagtaggagtagccc

SEQ ID NO: 150 - DNA, 20 bp, synthetic construct
  source 1..20: mol_type = other DNA
atgcaggagtaggagtagcc

SEQ ID NO: 151 - DNA, 20 bp, synthetic construct
  source 1..20: mol_type = other DNA
catgcaggagtaggagtagc

SEQ ID NO: 152 - DNA, 20 bp, synthetic construct
  source 1..20: mol_type = other DNA
ccatgcaggagtaggagtag

SEQ ID NO: 153 - DNA, 20 bp, synthetic construct
  source 1..20: mol_type = other DNA
gccatgcaggagtaggagta

SEQ ID NO: 154 - DNA, 20 bp, synthetic construct
  source 1..20: mol_type = other DNA
ggccatgcaggagtaggagt

SEQ ID NO: 155 - DNA, 20 bp, synthetic construct
  source 1..20: mol_type = other DNA
gggccatgcaggagtaggag

SEQ ID NO: 156 - DNA, 20 bp, synthetic construct
  source 1..20: mol_type = other DNA
agggccatgcaggagtagga

SEQ ID NO: 157 - DNA, 20 bp, synthetic construct
  source 1..20: mol_type = other DNA
gagggccatgcaggagtagg

SEQ ID NO: 158 - DNA, 20 bp, synthetic construct
  source 1..20: mol_type = other DNA
ctgagggccatgcaggagta

SEQ ID NO: 159 - DNA, 20 bp, synthetic construct
  source 1..20: mol_type = other DNA
cctgagggccatgcaggagt

SEQ ID NO: 160 - DNA, 20 bp, synthetic construct
  source 1..20: mol_type = other DNA
ccctgagggccatgcaggag

SEQ ID NO: 161 - DNA, 20 bp, synthetic construct
  source 1..20: mol_type = other DNA
tccctgagggccatgcagga

SEQ ID NO: 162 - DNA, 20 bp, synthetic construct
  source 1..20: mol_type = other DNA
gtccctgagggccatgcagg

SEQ ID NO: 163 - DNA, 20 bp, synthetic construct
  source 1..20: mol_type = other DNA
tgtccctgagggccatgcag

SEQ ID NO: 164 - DNA, 20 bp, synthetic construct
  source 1..20: mol_type = other DNA
ctgtccctgagggccatgca

SEQ ID NO: 165 - DNA, 20 bp, synthetic construct
  source 1..20: mol_type = other DNA
actgtccctgagggccatgc

SEQ ID NO: 166 - DNA, 20 bp, synthetic construct
  source 1..20: mol_type = other DNA
cactgtccctgagggccatg

SEQ ID NO: 167 - DNA, 20 bp, synthetic construct
  source 1..20: mol_type = other DNA
tcactgtccctgagggccat

SEQ ID NO: 168 - DNA, 20 bp, synthetic construct
  source 1..20: mol_type = other DNA
ctcactgtccctgagggcca

SEQ ID NO: 169 - DNA, 20 bp, synthetic construct
  source 1..20: mol_type = other DNA
cctcactgtccctgagggcc

SEQ ID NO: 170 - DNA, 20 bp, synthetic construct
  source 1..20: mol_type = other DNA
acctcactgtccctgagggc

SEQ ID NO: 171 - DNA, 20 bp, synthetic construct
  source 1..20: mol_type = other DNA
gacctcactgtccctgaggg

SEQ ID NO: 172 - DNA, 20 bp, synthetic construct
  source 1..20: mol_type = other DNA
ggacctcactgtccctgagg

SEQ ID NO: 173 - DNA, 20 bp, synthetic construct
  source 1..20: mol_type = other DNA
gggacctcactgtccctgag

SEQ ID NO: 174 - DNA, 20 bp, synthetic construct
  source 1..20: mol_type = other DNA
cctccagttccatgggtgtg

SEQ ID NO: 175 - DNA, 20 bp, synthetic construct
  source 1..20: mol_type = other DNA
gcctccagttccatgggtgt

SEQ ID NO: 176 - DNA, 20 bp, synthetic construct
  source 1..20: mol_type = other DNA
ggcctccagttccatgggtg

SEQ ID NO: 177 - DNA, 20 bp, synthetic construct
  source 1..20: mol_type = other DNA
cggcctccagttccatgggt

SEQ ID NO: 178 - DNA, 20 bp, synthetic construct
  source 1..20: mol_type = other DNA
tcggcctccagttccatggg

SEQ ID NO: 179 - DNA, 20 bp, synthetic construct
  source 1..20: mol_type = other DNA
ctcggcctccagttccatgg

SEQ ID NO: 180 - DNA, 20 bp, synthetic construct
  source 1..20: mol_type = other DNA
gctcggcctccagttccatg

SEQ ID NO: 181 - DNA, 20 bp, synthetic construct
  source 1..20: mol_type = other DNA
tgctcggcctccagttccat

SEQ ID NO: 182 - DNA, 20 bp, synthetic construct
  source 1..20: mol_type = other DNA
ctgctcggcctccagttcca

SEQ ID NO: 183 - DNA, 20 bp, synthetic construct
  source 1..20: mol_type = other DNA
gctgctcggcctccagttcc

SEQ ID NO: 184 - DNA, 20 bp, synthetic construct
  source 1..20: mol_type = other DNA
agctgctcggcctccagttc

SEQ ID NO: 185 - DNA, 20 bp, synthetic construct
  source 1..20: mol_type = other DNA
cagctgctcggcctccagtt

SEQ ID NO: 186 - DNA, 20 bp, synthetic construct
  source 1..20: mol_type = other DNA
gcagctgctcggcctccagt

SEQ ID NO: 187 - DNA, 20 bp, synthetic construct
  source 1..20: mol_type = other DNA
agcagctgctcggcctccag

SEQ ID NO: 188 - DNA, 20 bp, synthetic construct
  source 1..20: mol_type = other DNA
aagcagctgctcggcctcca

SEQ ID NO: 189 - DNA, 20 bp, synthetic construct
  source 1..20: mol_type = other DNA
caagcagctgctcggcctcc

SEQ ID NO: 190 - DNA, 20 bp, synthetic construct
  source 1..20: mol_type = other DNA
tcaagcagctgctcggcctc

SEQ ID NO: 191 - DNA, 20 bp, synthetic construct
  source 1..20: mol_type = other DNA
ctcaagcagctgctcggcct

SEQ ID NO: 192 - DNA, 20 bp, synthetic construct
  source 1..20: mol_type = other DNA
gctcaagcagctgctcggcc

SEQ ID NO: 193 - DNA, 20 bp, synthetic construct
  source 1..20: mol_type = other DNA
ggctcaagcagctgctcggc

SEQ ID NO: 194 - DNA, 20 bp, synthetic construct
  source 1..20: mol_type = other DNA
tggctcaagcagctgctcgg

SEQ ID NO: 195 - DNA, 20 bp, synthetic construct
  source 1..20: mol_type = other DNA
gtggctcaagcagctgctcg

SEQ ID NO: 196 - DNA, 20 bp, synthetic construct
  source 1..20: mol_type = other DNA
tgtggctcaagcagctgctc

SEQ ID NO: 197 - DNA, 20 bp, synthetic construct
  source 1..20: mol_type = other DNA
gtgtggctcaagcagctgct

SEQ ID NO: 198 - DNA, 20 bp, synthetic construct
  source 1..20: mol_type = other DNA
ccacttcagctgtttcatcc

SEQ ID NO: 199 - DNA, 20 bp, synthetic construct
  source 1..20: mol_type = other DNA
tgccacttcagctgtttcat

SEQ ID NO: 200 - DNA, 20 bp, synthetic construct
  source 1..20: mol_type = other DNA
ctgccacttcagctgtttca

SEQ ID NO: 201 - DNA, 20 bp, synthetic construct
  source 1..20: mol_type = other DNA
actgccacttcagctgtttc

SEQ ID NO: 202 - DNA, 20 bp, synthetic construct
  source 1..20: mol_type = other DNA
aactgccacttcagctgttt

SEQ ID NO: 203 - DNA, 20 bp, synthetic construct
  source 1..20: mol_type = other DNA
gaactgccacttcagctgtt

SEQ ID NO: 204 - DNA, 20 bp, synthetic construct
  source 1..20: mol_type = other DNA
ggaactgccacttcagctgt

SEQ ID NO: 205 - DNA, 20 bp, synthetic construct
  source 1..20: mol_type = other DNA
tggaactgccacttcagctg

SEQ ID NO: 206 - DNA, 20 bp, synthetic construct
  source 1..20: mol_type = other DNA
ctggaactgccacttcagct

SEQ ID NO: 207 - DNA, 20 bp, synthetic construct
  source 1..20: mol_type = other DNA
gctggaactgccacttcagc

SEQ ID NO: 208 - DNA, 20 bp, synthetic construct
  source 1..20: mol_type = other DNA
cgctggaactgccacttcag

SEQ ID NO: 209 - DNA, 20 bp, synthetic construct
  source 1..20: mol_type = other DNA
ccgctggaactgccacttca

SEQ ID NO: 210 - DNA, 20 bp, synthetic construct
  source 1..20: mol_type = other DNA
gccgctggaactgccacttc

SEQ ID NO: 211 - DNA, 20 bp, synthetic construct
  source 1..20: mol_type = other DNA
agccgctggaactgccactt

SEQ ID NO: 212 - DNA, 20 bp, synthetic construct
  source 1..20: mol_type = other DNA
ctcagcctctgccgcaggga

SEQ ID NO: 213 - DNA, 20 bp, synthetic construct
  source 1..20: mol_type = other DNA
cctcagcctctgccgcaggg

SEQ ID NO: 214 - DNA, 20 bp, synthetic construct
  source 1..20: mol_type = other DNA
ggcctcagcctctgccgcag

SEQ ID NO: 215 - DNA, 20 bp, synthetic construct
  source 1..20: mol_type = other DNA
cggcctcagcctctgccgca

SEQ ID NO: 216 - DNA, 20 bp, synthetic construct
  source 1..20: mol_type = other DNA
tcggcctcagcctctgccgc

SEQ ID NO: 217 - DNA, 20 bp, synthetic construct
  source 1..20: mol_type = other DNA
ctcggcctcagcctctgccg

SEQ ID NO: 218 - DNA, 20 bp, synthetic construct
  source 1..20: mol_type = other DNA
cctcggcctcagcctctgcc

SEQ ID NO: 219 - DNA, 20 bp, synthetic construct
  source 1..20: mol_type = other DNA
acctcggcctcagcctctgc

SEQ ID NO: 220 - DNA, 20 bp, synthetic construct
  source 1..20: mol_type = other DNA
cacctcggcctcagcctctg

SEQ ID NO: 221 - DNA, 20 bp, synthetic construct
  source 1..20: mol_type = other DNA
tcacctcggcctcagcctct

SEQ ID NO: 222 - DNA, 20 bp, synthetic construct
  source 1..20: mol_type = other DNA
gtcacctcggcctcagcctc

SEQ ID NO: 223 - DNA, 20 bp, synthetic construct
  source 1..20: mol_type = other DNA
cgtcacctcggcctcagcct

SEQ ID NO: 224 - DNA, 20 bp, synthetic construct
  source 1..20: mol_type = other DNA
agcacctcctcctccagggc

SEQ ID NO: 225 - DNA, 20 bp, synthetic construct
  source 1..20: mol_type = other DNA
gagcacctcctcctccaggg

SEQ ID NO: 226 - DNA, 20 bp, synthetic construct
  source 1..20: mol_type = other DNA
tgagcacctcctcctccagg

SEQ ID NO: 227 - DNA, 20 bp, synthetic construct
  source 1..20: mol_type = other DNA
gtgagcacctcctcctccag

SEQ ID NO: 228 - DNA, 20 bp, synthetic construct
  source 1..20: mol_type = other DNA
ggtgagcacctcctcctcca

SEQ ID NO: 229 - DNA, 20 bp, synthetic construct
  source 1..20: mol_type = other DNA
gggtgagcacctcctcctcc

SEQ ID NO: 230 - DNA, 20 bp, synthetic construct
  source 1..20: mol_type = other DNA
cgggtgagcacctcctcctc

SEQ ID NO: 231 - DNA, 20 bp, synthetic construct
  source 1..20: mol_type = other DNA
ccgggtgagcacctcctcct

SEQ ID NO: 232 - DNA, 20 bp, synthetic construct
  source 1..20: mol_type = other DNA
gccgggtgagcacctcctcc

SEQ ID NO: 233 - DNA, 20 bp, synthetic construct
  source 1..20: mol_type = other DNA
tgccgggtgagcacctcctc

SEQ ID NO: 234 - DNA, 20 bp, synthetic construct
  source 1..20: mol_type = other DNA
ctgccgggtgagcacctcct

SEQ ID NO: 235 - DNA, 20 bp, synthetic construct
  source 1..20: mol_type = other DNA
tctgccgggtgagcacctcc

SEQ ID NO: 236 - DNA, 20 bp, synthetic construct
  source 1..20: mol_type = other DNA
gctctgccgggtgagcacct

SEQ ID NO: 237 - DNA, 20 bp, synthetic construct
  source 1..20: mol_type = other DNA
ggctctgccgggtgagcacc

SEQ ID NO: 238 - DNA, 20 bp, synthetic construct
  source 1..20: mol_type = other DNA
aggctctgccgggtgagcac

SEQ ID NO: 239 - DNA, 20 bp, synthetic construct
  source 1..20: mol_type = other DNA
caggctctgccgggtgagca

SEQ ID NO: 240 - DNA, 20 bp, synthetic construct
  source 1..20: mol_type = other DNA
tcaggctctgccgggtgagc

SEQ ID NO: 241 - DNA, 20 bp, synthetic construct
  source 1..20: mol_type = other DNA
gctcaggctctgccgggtga

SEQ ID NO: 242 - DNA, 20 bp, synthetic construct
  source 1..20: mol_type = other DNA
cggctcaggctctgccgggt

SEQ ID NO: 243 - DNA, 20 bp, synthetic construct
  source 1..20: mol_type = other DNA
ccggctcaggctctgccggg

SEQ ID NO: 244 - DNA, 20 bp, synthetic construct
  source 1..20: mol_type = other DNA
cccggctcaggctctgccgg

SEQ ID NO: 245 - DNA, 20 bp, synthetic construct
  source 1..20: mol_type = other DNA
tcccggctcaggctctgccg

SEQ ID NO: 246 - DNA, 20 bp, synthetic construct
  source 1..20: mol_type = other DNA
ctcccggctcaggctctgcc

SEQ ID NO: 247 - DNA, 20 bp, synthetic construct
  source 1..20: mol_type = other DNA
tctcccggctcaggctctgc

SEQ ID NO: 248 - DNA, 20 bp, synthetic construct
  source 1..20: mol_type = other DNA
atctcccggctcaggctctg

SEQ ID NO: 249 - DNA, 20 bp, synthetic construct
  source 1..20: mol_type = other DNA
catctcccggctcaggctct

SEQ ID NO: 250 - DNA, 20 bp, synthetic construct
  source 1..20: mol_type = other DNA
ccatctcccggctcaggctc

SEQ ID NO: 251 - DNA, 20 bp, synthetic construct
  source 1..20: mol_type = other DNA
tccatctcccggctcaggct

SEQ ID NO: 252 - DNA, 20 bp, synthetic construct
  source 1..20: mol_type = other DNA
ctccatctcccggctcaggc

SEQ ID NO: 253 - DNA, 20 bp, synthetic construct
  source 1..20: mol_type = other DNA
cctccatctcccggctcagg

SEQ ID NO: 254 - DNA, 20 bp, synthetic construct
  source 1..20: mol_type = other DNA
gcctccatctcccggctcag

SEQ ID NO: 255 - DNA, 20 bp, synthetic construct
  source 1..20: mol_type = other DNA
ggcctccatctcccggctca

SEQ ID NO: 256 - DNA, 20 bp, synthetic construct
  source 1..20: mol_type = other DNA
tggcctccatctcccggctc

SEQ ID NO: 257 - DNA, 20 bp, synthetic construct
  source 1..20: mol_type = other DNA
atggcctccatctcccggct

SEQ ID NO: 258 - DNA, 20 bp, synthetic construct
  source 1..20: mol_type = other DNA
gatggcctccatctcccggc

SEQ ID NO: 259 - DNA, 20 bp, synthetic construct
  source 1..20: mol_type = other DNA
ggatggcctccatctcccgg

SEQ ID NO: 260 - DNA, 20 bp, synthetic construct
  source 1..20: mol_type = other DNA
cggatggcctccatctcccg

SEQ ID NO: 261 - DNA, 20 bp, synthetic construct
  source 1..20: mol_type = other DNA
gcggatggcctccatctccc

SEQ ID NO: 262 - DNA, 20 bp, synthetic construct
  source 1..20: mol_type = other DNA
tgcggatggcctccatctcc

SEQ ID NO: 263 - DNA, 20 bp, synthetic construct
  source 1..20: mol_type = other DNA
gttccgagcctctgcctcgc

SEQ ID NO: 264 - DNA, 20 bp, synthetic construct
  source 1..20: mol_type = other DNA
gtcggaggacgaggtcaata

SEQ ID NO: 265 - DNA, 20 bp, synthetic construct
  source 1..20: mol_type = other DNA
agggcctcagcctggccgaa

SEQ ID NO: 266 - DNA, 20 bp, synthetic construct
  source 1..20: mol_type = other DNA
cagggcctcagcctggccga

SEQ ID NO: 267 - DNA, 20 bp, synthetic construct
  source 1..20: mol_type = other DNA
gtcagggcctcagcctggcc

SEQ ID NO: 268 - DNA, 20 bp, synthetic construct
  source 1..20: mol_type = other DNA
cgtcagggcctcagcctggc

SEQ ID NO: 269 - DNA, 20 bp, synthetic construct
  source 1..20: mol_type = other DNA
agcaaatttcccgagtaagc

SEQ ID NO: 270 - DNA, 20 bp, synthetic construct
  source 1..20: mol_type = other DNA
aagcaaatttcccgagtaag

SEQ ID NO: 271 - DNA, 20 bp, synthetic construct
  source 1..20: mol_type = other DNA
aaaagcaaatttcccgagta

SEQ ID NO: 272 - DNA, 20 bp, synthetic construct
  source 1..20: mol_type = other DNA
caaaagcaaatttcccgagt

SEQ ID NO: 273 - DNA, 20 bp, synthetic construct
  source 1..20: mol_type = other DNA
gcaaaagcaaatttcccgag

SEQ ID NO: 274 - DNA, 20 bp, synthetic construct
  source 1..20: mol_type = other DNA
ggcaaaagcaaatttcccga

SEQ ID NO: 275 - DNA, 20 bp, synthetic construct
  source 1..20: mol_type = other DNA
tggcaaaagcaaatttcccg

SEQ ID NO: 276 - DNA, 20 bp, synthetic construct
  source 1..20: mol_type = other DNA
tttggcaaaagcaaatttcc

SEQ ID NO: 277 - DNA, 20 bp, synthetic construct
  source 1..20: mol_type = other DNA
gtttggcaaaagcaaatttc

SEQ ID NO: 278 - DNA, 20 bp, synthetic construct
  source 1..20: mol_type = other DNA
gggtttggcaaaagcaaatt

SEQ ID NO: 279 - DNA, 20 bp, synthetic construct
  source 1..20: mol_type = other DNA
cgggtttggcaaaagcaaat

SEQ ID NO: 280 - DNA, 20 bp, synthetic construct
  source 1..20: mol_type = other DNA
aagcgggtttggcaaaagca

SEQ ID NO: 281 - DNA, 20 bp, synthetic construct
  source 1..20: mol_type = other DNA
aatatccaaaccgccgaagc

SEQ ID NO: 282 - DNA, 20 bp, synthetic construct
  source 1..20: mol_type = other DNA
aaatatccaaaccgccgaag

SEQ ID NO: 283 - DNA, 20 bp, synthetic construct
  source 1..20: mol_type = other DNA
ataaatatccaaaccgccga

SEQ ID NO: 284 - DNA, 20 bp, synthetic construct
  source 1..20: mol_type = other DNA
aataaatatccaaaccgccg

SEQ ID NO: 285 - DNA, 20 bp, synthetic construct
  source 1..20: mol_type = other DNA
tcaataaatatccaaaccgc

SEQ ID NO: 286 - DNA, 20 bp, synthetic construct
  source 1..20: mol_type = other DNA
gtcaataaatatccaaaccg

SEQ ID NO: 287 - DNA, 20 bp, synthetic construct
  source 1..20: mol_type = other DNA
ggtcaataaatatccaaacc

SEQ ID NO: 288 - DNA, 20 bp, synthetic construct
  source 1..20: mol_type = other DNA
aggtcaataaatatccaaac

SEQ ID NO: 289 - DNA, 20 bp, synthetic construct
  source 1..20: mol_type = other DNA
gaggtcaataaatatccaaa

SEQ ID NO: 290 - DNA, 20 bp, synthetic construct
  source 1..20: mol_type = other DNA
acgaggtcaataaatatcca

SEQ ID NO: 291 - DNA, 20 bp, synthetic construct
  source 1..20: mol_type = other DNA
gacgaggtcaataaatatcc

SEQ ID NO: 292 - DNA, 20 bp, synthetic construct
  source 1..20: mol_type = other DNA
aggacgaggtcaataaatat

SEQ ID NO: 293 - DNA, 20 bp, synthetic construct
  source 1..20: mol_type = other DNA
gaggacgaggtcaataaata

SEQ ID NO: 294 - DNA, 20 bp, synthetic construct
  source 1..20: mol_type = other DNA
cggaggacgaggtcaataaa

SEQ ID NO: 295 - DNA, 20 bp, synthetic construct
  source 1..20: mol_type = other DNA
tcggaggacgaggtcaataa

SEQ ID NO: 296 - DNA, 20 bp, synthetic construct
  source 1..20: mol_type = other DNA
agtcggaggacgaggtcaat

SEQ ID NO: 297 - DNA, 20 bp, synthetic construct
  source 1..20: mol_type = other DNA
gagtcggaggacgaggtcaa

SEQ ID NO: 298 - DNA, 20 bp, synthetic construct
  source 1..20: mol_type = other DNA
gcgagtcggaggacgaggtc

SEQ ID NO: 299 - DNA, 20 bp, synthetic construct
  source 1..20: mol_type = other DNA
agcgagtcggaggacgaggt

SEQ ID NO: 300 - DNA, 20 bp, synthetic construct
  source 1..20: mol_type = other DNA
cagcgagtcggaggacgagg

SEQ ID NO: 301 - DNA, 20 bp, synthetic construct
  source 1..20: mol_type = other DNA
tcagcgagtcggaggacgag

SEQ ID NO: 302 - DNA, 20 bp, synthetic construct
  source 1..20: mol_type = other DNA
gtcagcgagtcggaggacga

SEQ ID NO: 303 - DNA, 20 bp, synthetic construct
  source 1..20: mol_type = other DNA
ctgtcagcgagtcggaggac

SEQ ID NO: 304 - DNA, 20 bp, synthetic construct
  source 1..20: mol_type = other DNA
cctgtcagcgagtcggagga

SEQ ID NO: 305 - DNA, 20 bp, synthetic construct
  source 1..20: mol_type = other DNA
agcctgtcagcgagtcggag

SEQ ID NO: 306 - DNA, 20 bp, synthetic construct
  source 1..20: mol_type = other DNA
gtctcagtgcatccaaaacg

SEQ ID NO: 307 - DNA, 20 bp, synthetic construct
  source 1..20: mol_type = other DNA
ggtctcagtgcatccaaaac

SEQ ID NO: 308 - DNA, 20 bp, synthetic construct
  source 1..20: mol_type = other DNA
gggtctcagtgcatccaaaa

SEQ ID NO: 309 - DNA, 20 bp, synthetic construct
  source 1..20: mol_type = other DNA
ggagggccttttattcgcga

SEQ ID NO: 310 - DNA, 20 bp, synthetic construct
  source 1..20: mol_type = other DNA
tggagggccttttattcgcg

SEQ ID NO: 311 - DNA, 20 bp, synthetic construct
  source 1..20: mol_type = other DNA
atggagggccttttattcgc

SEQ ID NO: 312 - DNA, 20 bp, synthetic construct
  source 1..20: mol_type = other DNA
gatggagggccttttattcg

SEQ ID NO: 313 - DNA, 20 bp, synthetic construct
  source 1..20: mol_type = other DNA
agatggagggccttttattc

SEQ ID NO: 314 - DNA, 20 bp, synthetic construct
  source 1..20: mol_type = other DNA
cagatggagggccttttatt

SEQ ID NO: 315 - DNA, 20 bp, synthetic construct
  source 1..20: mol_type = other DNA
gcagatggagggccttttat

SEQ ID NO: 316 - DNA, 20 bp, synthetic construct
  source 1..20: mol_type = other DNA
ccctcaggctctctgcttta

SEQ ID NO: 317 - DNA, 20 bp, synthetic construct
  source 1..20: mol_type = other DNA
gccctcaggctctctgcttt

SEQ ID NO: 318 - DNA, 20 bp, synthetic construct
  source 1..20: mol_type = other DNA
agccctcaggctctctgctt

SEQ ID NO: 319 - DNA, 20 bp, synthetic construct
  source 1..20: mol_type = other DNA
tagccctcaggctctctgct

SEQ ID NO: 320 - DNA, 20 bp, synthetic construct
  source 1..20: mol_type = other DNA
ttagccctcaggctctctgc

SEQ ID NO: 321 - DNA, 20 bp, synthetic construct
  source 1..20: mol_type = other DNA
tttagccctcaggctctctg

SEQ ID NO: 322 - DNA, 20 bp, synthetic construct
  source 1..20: mol_type = other DNA
atttagccctcaggctctct

SEQ ID NO: 323 - DNA, 20 bp, synthetic construct
  source 1..20: mol_type = other DNA
aatttagccctcaggctctc

SEQ ID NO: 324 - DNA, 20 bp, synthetic construct
  source 1..20: mol_type = other DNA
aaatttagccctcaggctct

SEQ ID NO: 325 - DNA, 20 bp, synthetic construct
  source 1..20: mol_type = other DNA
taaatttagccctcaggctc

SEQ ID NO: 326 - DNA, 20 bp, synthetic construct
  source 1..20: mol_type = other DNA
ttaaatttagccctcaggct

SEQ ID NO: 327 - DNA, 20 bp, synthetic construct
  source 1..20: mol_type = other DNA
gttaaatttagccctcaggc

SEQ ID NO: 328 - DNA, 20 bp, synthetic construct
  source 1..20: mol_type = other DNA
agttaaatttagccctcagg

SEQ ID NO: 329 - DNA, 20 bp, synthetic construct
  source 1..20: mol_type = other DNA
cagttaaatttagccctcag

SEQ ID NO: 330 - DNA, 20 bp, synthetic construct
  source 1..20: mol_type = other DNA
acagttaaatttagccctca

SEQ ID NO: 331 - DNA, 20 bp, synthetic construct
  source 1..20: mol_type = other DNA
gacagttaaatttagccctc

SEQ ID NO: 332 - DNA, 20 bp, synthetic construct
  source 1..20: mol_type = other DNA
ggacagttaaatttagccct

SEQ ID NO: 333 - DNA, 20 bp, synthetic construct
  source 1..20: mol_type = other DNA
cggacagttaaatttagccc

SEQ ID NO: 334 - DNA, 20 bp, synthetic construct
  source 1..20: mol_type = other DNA
tcggacagttaaatttagcc

SEQ ID NO: 335 - DNA, 20 bp, synthetic construct
  source 1..20: mol_type = other DNA
ctcggacagttaaatttagc

SEQ ID NO: 336 - DNA, 20 bp, synthetic construct
  source 1..20: mol_type = other DNA
actcggacagttaaatttag

SEQ ID NO: 337 - DNA, 20 bp, synthetic construct
  source 1..20: mol_type = other DNA
gactcggacagttaaattta

SEQ ID NO: 338 - DNA, 20 bp, synthetic construct
  source 1..20: mol_type = other DNA
cgactcggacagttaaattt

SEQ ID NO: 339 - DNA, 20 bp, synthetic construct
  source 1..20: mol_type = other DNA
ccgactcggacagttaaatt

SEQ ID NO: 340 - DNA, 20 bp, synthetic construct
  source 1..20: mol_type = other DNA
tccgactcggacagttaaat

SEQ ID NO: 341 - DNA, 16 bp, synthetic construct
  source 1..16: mol_type = other DNA
tctcctcacggaagca

SEQ ID NO: 342 - DNA, 16 bp, synthetic construct
  source 1..16: mol_type = other DNA
ctctcctcacggaagc

SEQ ID NO: 343 - DNA, 16 bp, synthetic construct
  source 1..16: mol_type = other DNA
cctctcctcacggaag

SEQ ID NO: 344 - DNA, 16 bp, synthetic construct
  source 1..16: mol_type = other DNA
aaacttgctcagcagt

SEQ ID NO: 345 - DNA, 16 bp, synthetic construct
  source 1..16: mol_type = other DNA
caaacttgctcagcag

SEQ ID NO: 346 - DNA, 16 bp, synthetic construct
  source 1..16: mol_type = other DNA
ccaaacttgctcagca

SEQ ID NO: 347 - DNA, 16 bp, synthetic construct
  source 1..16: mol_type = other DNA
cccaaacttgctcagc

SEQ ID NO: 348 - DNA, 16 bp, synthetic construct
  source 1..16: mol_type = other DNA
ccccaaacttgctcag

SEQ ID NO: 349 - DNA, 16 bp, synthetic construct
  source 1..16: mol_type = other DNA
tccccaaacttgctca

SEQ ID NO: 350 - DNA, 16 bp, synthetic construct
  source 1..16: mol_type = other DNA
gtttgatgtccctgtg

SEQ ID NO: 351 - DNA, 16 bp, synthetic construct
  source 1..16: mol_type = other DNA
ggtttgatgtccctgt

SEQ ID NO: 352 - DNA, 16 bp, synthetic construct
  source 1..16: mol_type = other DNA
gggtttgatgtccctg

SEQ ID NO: 353 - DNA, 16 bp, synthetic construct
  source 1..16: mol_type = other DNA
acagcctgcaggatct

SEQ ID NO: 354 - DNA, 16 bp, synthetic construct
  source 1..16: mol_type = other DNA
cacagcctgcaggatc

SEQ ID NO: 355 - DNA, 16 bp, synthetic construct
  source 1..16: mol_type = other DNA
ccacagcctgcaggat

SEQ ID NO: 356 - DNA, 16 bp, synthetic construct
  source 1..16: mol_type = other DNA
cccacagcctgcagga

SEQ ID NO: 357 - DNA, 16 bp, synthetic construct
  source 1..16: mol_type = other DNA
gcccacagcctgcagg

SEQ ID NO: 358 - DNA, 16 bp, synthetic construct
  source 1..16: mol_type = other DNA
cgcccacagcctgcag

SEQ ID NO: 359 - DNA, 16 bp, synthetic construct
  source 1..16: mol_type = other DNA
ccgcccacagcctgca

SEQ ID NO: 360 - DNA, 16 bp, synthetic construct
  source 1..16: mol_type = other DNA
accgcccacagcctgc

SEQ ID NO: 361 - DNA, 16 bp, synthetic construct
  source 1..16: mol_type = other DNA
caccgcccacagcctg

SEQ ID NO: 362 - DNA, 16 bp, synthetic construct
  source 1..16: mol_type = other DNA
ccaccgcccacagcct

SEQ ID NO: 363 - DNA, 16 bp, synthetic construct
  source 1..16: mol_type = other DNA
cccaccgcccacagcc

SEQ ID NO: 364 - DNA, 16 bp, synthetic construct
  source 1..16: mol_type = other DNA
gcccaccgcccacagc

SEQ ID NO: 365 - DNA, 16 bp, synthetic construct
  source 1..16: mol_type = other DNA
ccaggcccaccgccca

SEQ ID NO: 366 - DNA, 16 bp, synthetic construct
  source 1..16: mol_type = other DNA
cccaggcccaccgccc

SEQ ID NO: 367 - DNA, 16 bp, synthetic construct
  source 1..16: mol_type = other DNA
tcccaggcccaccgcc

SEQ ID NO: 368 - DNA, 16 bp, synthetic construct
  source 1..16: mol_type = other DNA
tgcctgtcccaggccc

SEQ ID NO: 369 - DNA, 16 bp, synthetic construct
  source 1..16: mol_type = other DNA
ctgcctgtcccaggcc

SEQ ID NO: 370 - DNA, 16 bp, synthetic construct
  source 1..16: mol_type = other DNA
gctgcctgtcccaggc

SEQ ID NO: 371 - DNA, 16 bp, synthetic construct
  source 1..16: mol_type = other DNA
ggtggcaccttcgaaa

SEQ ID NO: 372 - DNA, 16 bp, synthetic construct
  source 1..16: mol_type = other DNA
cggtggcaccttcgaa

SEQ ID NO: 373 - DNA, 16 bp, synthetic construct
  source 1..16: mol_type = other DNA
tcggtggcaccttcga

SEQ ID NO: 374 - DNA, 16 bp, synthetic construct
  source 1..16: mol_type = other DNA
agtgagcccgtcctcc

SEQ ID NO: 375 - DNA, 16 bp, synthetic construct
  source 1..16: mol_type = other DNA
cagtgagcccgtcctc

SEQ ID NO: 376 - DNA, 16 bp, synthetic construct
  source 1..16: mol_type = other DNA
gcagtgagcccgtcct

SEQ ID NO: 377 - DNA, 16 bp, synthetic construct
  source 1..16: mol_type = other DNA
tcccgaatgtccgaca

SEQ ID NO: 378 - DNA, 16 bp, synthetic construct
  source 1..16: mol_type = other DNA
ttcccgaatgtccgac

SEQ ID NO: 379 - DNA, 16 bp, synthetic construct
  source 1..16: mol_type = other DNA
cttcccgaatgtccga

SEQ ID NO: 380 - DNA, 16 bp, synthetic construct
  source 1..16: mol_type = other DNA
ccttcccgaatgtccg

SEQ ID NO: 381 - DNA, 16 bp, synthetic construct
  source 1..16: mol_type = other DNA
accttcccgaatgtcc

SEQ ID NO: 382 - DNA, 16 bp, synthetic construct
  source 1..16: mol_type = other DNA
caccttcccgaatgtc

SEQ ID NO: 383 - DNA, 16 bp, synthetic construct
  source 1..16: mol_type = other DNA
gcaccttcccgaatgt

SEQ ID NO: 384 - DNA, 16 bp, synthetic construct
  source 1..16: mol_type = other DNA
cgcaccttcccgaatg

SEQ ID NO: 385 - DNA, 16 bp, synthetic construct
  source 1..16: mol_type = other DNA
atccgctcctgcaact

SEQ ID NO: 386 - DNA, 16 bp, synthetic construct
  source 1..16: mol_type = other DNA
catccgctcctgcaac

SEQ ID NO: 387 - DNA, 16 bp, synthetic construct
  source 1..16: mol_type = other DNA
ccatccgctcctgcaa

SEQ ID NO: 388 - DNA, 16 bp, synthetic construct
  source 1..16: mol_type = other DNA
gctccctctgcctgca

SEQ ID NO: 389 - DNA, 16 bp, synthetic construct
  source 1..16: mol_type = other DNA
aggtggatccgtggcc

SEQ ID NO: 390 - DNA, 16 bp, synthetic construct
  source 1..16: mol_type = other DNA
gggaaggtggatccgt

SEQ ID NO: 391 - DNA, 16 bp, synthetic construct
  source 1..16: mol_type = other DNA
acaggagcagggaaag

SEQ ID NO: 392 - DNA, 16 bp, synthetic construct
  source 1..16: mol_type = other DNA
cagactgcggtgagtt

SEQ ID NO: 393 - DNA, 16 bp, synthetic construct
  source 1..16: mol_type = other DNA
ggctcctgggcggcgc

SEQ ID NO: 394 - DNA, 16 bp, synthetic construct
  source 1..16: mol_type = other DNA
ggcggctcctgggcgg

SEQ ID NO: 395 - DNA, 16 bp, synthetic construct
  source 1..16: mol_type = other DNA
cgcgggcggctcctgg

SEQ ID NO: 396 - DNA, 16 bp, synthetic construct
  source 1..16: mol_type = other DNA
gagcgcgggcggctcc

SEQ ID NO: 397 - DNA, 16 bp, synthetic construct
  source 1..16: mol_type = other DNA
ggttcagggagcgcgg

SEQ ID NO: 398 - DNA, 16 bp, synthetic construct
  source 1..16: mol_type = other DNA
agttctagggttcagg

SEQ ID NO: 399 - DNA, 16 bp, synthetic construct
  source 1..16: mol_type = other DNA
cagttctagggttcag

SEQ ID NO: 400 - DNA, 16 bp, synthetic construct
  source 1..16: mol_type = other DNA
acagttctagggttca

SEQ ID NO: 401 - DNA, 16 bp, synthetic construct
  source 1..16: mol_type = other DNA
gacagttctagggttc

SEQ ID NO: 402 - DNA, 16 bp, synthetic construct
  source 1..16: mol_type = other DNA
agacagttctagggtt

SEQ ID NO: 403 - DNA, 16 bp, synthetic construct
  source 1..16: mol_type = other DNA
aagacagttctagggt

SEQ ID NO: 404 - DNA, 16 bp, synthetic construct
  source 1..16: mol_type = other DNA
gaagacagttctaggg

SEQ ID NO: 405 - DNA, 16 bp, synthetic construct
  source 1..16: mol_type = other DNA
cgaagacagttctagg

SEQ ID NO: 406 - DNA, 16 bp, synthetic construct
  source 1..16: mol_type = other DNA
tcgaagacagttctag

SEQ ID NO: 407 - DNA, 16 bp, synthetic construct
  source 1..16: mol_type = other DNA
gtcgaagacagttcta

SEQ ID NO: 408 - DNA, 16 bp, synthetic construct
  source 1..16: mol_type = other DNA
agtcgaagacagttct

SEQ ID NO: 409 - DNA, 16 bp, synthetic construct
  source 1..16: mol_type = other DNA
gagtcgaagacagttc

SEQ ID NO: 410 - DNA, 16 bp, synthetic construct
  source 1..16: mol_type = other DNA
ggagtcgaagacagtt

SEQ ID NO: 411 - DNA, 16 bp, synthetic construct
  source 1..16: mol_type = other DNA
cggagtcgaagacagt

SEQ ID NO: 412 - DNA, 16 bp, synthetic construct
  source 1..16: mol_type = other DNA
ccggagtcgaagacag

SEQ ID NO: 413 - DNA, 16 bp, synthetic construct
  source 1..16: mol_type = other DNA
cccggagtcgaagaca

SEQ ID NO: 414 - DNA, 16 bp, synthetic construct
  source 1..16: mol_type = other DNA
ccccggagtcgaagac

SEQ ID NO: 415 - DNA, 16 bp, synthetic construct
  source 1..16: mol_type = other DNA
gccccggagtcgaaga

SEQ ID NO: 416 - DNA, 16 bp, synthetic construct
  source 1..16: mol_type = other DNA
ggccccggagtcgaag

SEQ ID NO: 417 - DNA, 16 bp, synthetic construct
  source 1..16: mol_type = other DNA
gggccccggagtcgaa

SEQ ID NO: 418 - DNA, 16 bp, synthetic construct
  source 1..16: mol_type = other DNA
cggttgtgaactggca

SEQ ID NO: 419 - DNA, 16 bp, synthetic construct
  source 1..16: mol_type = other DNA
agcggttgtgaactgg

SEQ ID NO: 420 - DNA, 16 bp, synthetic construct
  source 1..16: mol_type = other DNA
gcactttgcgaaccaa

SEQ ID NO: 421 - DNA, 16 bp, synthetic construct
  source 1..16: mol_type = other DNA
tgcactttgcgaacca

SEQ ID NO: 422 - DNA, 16 bp, synthetic construct
  source 1..16: mol_type = other DNA
actttgcgaaccaacg

SEQ ID NO: 423 - DNA, 16 bp, synthetic construct
  source 1..16: mol_type = other DNA
aaagctttgcactttg

SEQ ID NO: 424 - DNA, 16 bp, synthetic construct
  source 1..16: mol_type = other DNA
tcccgagtaagcaggc

SEQ ID NO: 425 - DNA, 16 bp, synthetic construct
  source 1..16: mol_type = other DNA
gcagcgcaagtgagga

SEQ ID NO: 426 - DNA, 16 bp, synthetic construct
  source 1..16: mol_type = other DNA
gtcagcgagtcggagg

SEQ ID NO: 427 - DNA, 16 bp, synthetic construct
  source 1..16: mol_type = other DNA
cctgtcagcgagtcgg

SEQ ID NO: 428 - DNA, 16 bp, synthetic construct
  source 1..16: mol_type = other DNA
gcctgtcagcgagtcg

SEQ ID NO: 429 - DNA, 16 bp, synthetic construct
  source 1..16: mol_type = other DNA
agcctgtcagcgagtc

SEQ ID NO: 430 - DNA, 16 bp, synthetic construct
  source 1..16: mol_type = other DNA
gggtctcagtgcatcc

SEQ ID NO: 431 - DNA, 16 bp, synthetic construct
  source 1..16: mol_type = other DNA
aggtttttccagaggc

SEQ ID NO: 432 - DNA, 16 bp, synthetic construct
  source 1..16: mol_type = other DNA
aaggtttttccagagg

SEQ ID NO: 433 - DNA, 16 bp, synthetic construct
  source 1..16: mol_type = other DNA
ggtcactgctgggtcc

SEQ ID NO: 434 - DNA, 16 bp, synthetic construct
  source 1..16: mol_type = other DNA
gtggtttctgtctgct

SEQ ID NO: 435 - DNA, 16 bp, synthetic construct
  source 1..16: mol_type = other DNA
cgtggtttctgtctgc

SEQ ID NO: 436 - DNA, 16 bp, synthetic construct
  source 1..16: mol_type = other DNA
gaactggcaggcggtg

SEQ ID NO: 437 - DNA, 16 bp, synthetic construct
  source 1..16: mol_type = other DNA
tgtgaactggcaggcg

SEQ ID NO: 438 - DNA, 16 bp, synthetic construct
  source 1..16: mol_type = other DNA
ggttgtgaactggcag

SEQ ID NO: 439 - DNA, 16 bp, synthetic construct
  source 1..16: mol_type = other DNA
gagcggttgtgaactg

SEQ ID NO: 440 - DNA, 16 bp, synthetic construct
  source 1..16: mol_type = other DNA
actggagctgggcgga

SEQ ID NO: 441 - DNA, 16 bp, synthetic construct
  source 1..16: mol_type = other DNA
aggactggagctgggc

SEQ ID NO: 442 - DNA, 16 bp, synthetic construct
  source 1..16: mol_type = other DNA
tcacaggactggagct

SEQ ID NO: 443 - DNA, 16 bp, synthetic construct
  source 1..16: mol_type = other DNA
atcacaggactggagc

SEQ ID NO: 444 - DNA, 16 bp, synthetic construct
  source 1..16: mol_type = other DNA
ggatcacaggactgga

SEQ ID NO: 445 - DNA, 16 bp, synthetic construct
  source 1..16: mol_type = other DNA
cagcctggccgaaaga

SEQ ID NO: 446 - DNA, 16 bp, synthetic construct
  source 1..16: mol_type = other DNA
ctcagcctggccgaaa

SEQ ID NO: 447 - DNA, 16 bp, synthetic construct
  source 1..16: mol_type = other DNA
gtcagggcctcagcct

SEQ ID NO: 448 - DNA, 16 bp, synthetic construct
  source 1..16: mol_type = other DNA
cgtcagggcctcagcc

SEQ ID NO: 449 - DNA, 16 bp, synthetic construct
  source 1..16: mol_type = other DNA
tttgcactttgcgaac

SEQ ID NO: 450 - DNA, 16 bp, synthetic construct
  source 1..16: mol_type = other DNA
gaaagctttgcacttt

SEQ ID NO: 451 - DNA, 16 bp, synthetic construct
  source 1..16: mol_type = other DNA
aatttcccgagtaagc

SEQ ID NO: 452 - DNA, 16 bp, synthetic construct
  source 1..16: mol_type = other DNA
gcaaatttcccgagta

SEQ ID NO: 453 - DNA, 16 bp, synthetic construct
  source 1..16: mol_type = other DNA
agcaaatttcccgagt

SEQ ID NO: 454 - DNA, 16 bp, synthetic construct
  source 1..16: mol_type = other DNA
aagcaaatttcccgag

SEQ ID NO: 455 - DNA, 16 bp, synthetic construct
  source 1..16: mol_type = other DNA
aaagcaaatttcccga

SEQ ID NO: 456 - DNA, 16 bp, synthetic construct
  source 1..16: mol_type = other DNA
aaaagcaaatttcccg

SEQ ID NO: 457 - DNA, 16 bp, synthetic construct
  source 1..16: mol_type = other DNA
gcaaaagcaaatttcc

SEQ ID NO: 458 - DNA, 16 bp, synthetic construct
  source 1..16: mol_type = other DNA
ggcaaaagcaaatttc

SEQ ID NO: 459 - DNA, 16 bp, synthetic construct
  source 1..16: mol_type = other DNA
ttggcaaaagcaaatt

SEQ ID NO: 460 - DNA, 16 bp, synthetic construct
  source 1..16: mol_type = other DNA
gtttggcaaaagcaaa

SEQ ID NO: 461 - DNA, 16 bp, synthetic construct
  source 1..16: mol_type = other DNA
ggtttggcaaaagcaa

SEQ ID NO: 462 - DNA, 16 bp, synthetic construct
  source 1..16: mol_type = other DNA
gggtttggcaaaagca

SEQ ID NO: 463 - DNA, 16 bp, synthetic construct
  source 1..16: mol_type = other DNA
gcgggtttggcaaaag

SEQ ID NO: 464 - DNA, 16 bp, synthetic construct
  source 1..16: mol_type = other DNA
agcgggtttggcaaaa

SEQ ID NO: 465 - DNA, 16 bp, synthetic construct
  source 1..16: mol_type = other DNA
aagcgggtttggcaaa

SEQ ID NO: 466 - DNA, 16 bp, synthetic construct
  source 1..16: mol_type = other DNA
ctccgagagcagcgca

SEQ ID NO: 467 - DNA, 16 bp, synthetic construct
  source 1..16: mol_type = other DNA
gctccgagagcagcgc

SEQ ID NO: 468 - DNA, 16 bp, synthetic construct
  source 1..16: mol_type = other DNA
ggctccgagagcagcg

SEQ ID NO: 469 - DNA, 16 bp, synthetic construct
  source 1..16: mol_type = other DNA
taaatatccaaaccgc

SEQ ID NO: 470 - DNA, 16 bp, synthetic construct
  source 1..16: mol_type = other DNA
gtcaataaatatccaa

SEQ ID NO: 471 - DNA, 16 bp, synthetic construct
  source 1..16: mol_type = other DNA
aggtcaataaatatcc

SEQ ID NO: 472 - DNA, 16 bp, synthetic construct
  source 1..16: mol_type = other DNA
cgaggtcaataaatat

SEQ ID NO: 473 - DNA, 16 bp, synthetic construct
  source 1..16: mol_type = other DNA
acgaggtcaataaata

SEQ ID NO: 474 - DNA, 16 bp, synthetic construct
  source 1..16: mol_type = other DNA
gacgaggtcaataaat

SEQ ID NO: 475 - DNA, 16 bp, synthetic construct
  source 1..16: mol_type = other DNA
ggacgaggtcaataaa

SEQ ID NO: 476 - DNA, 16 bp, synthetic construct
  source 1..16: mol_type = other DNA
aggacgaggtcaataa

SEQ ID NO: 477 - DNA, 16 bp, synthetic construct
  source 1..16: mol_type = other DNA
gaggacgaggtcaata

SEQ ID NO: 478 - DNA, 16 bp, synthetic construct
  source 1..16: mol_type = other DNA
ggaggacgaggtcaat

SEQ ID NO: 479 - DNA, 16 bp, synthetic construct
  source 1..16: mol_type = other DNA
cggaggacgaggtcaa

SEQ ID NO: 480 - DNA, 16 bp, synthetic construct
  source 1..16: mol_type = other DNA
tcggaggacgaggtca

SEQ ID NO: 481 - DNA, 16 bp, synthetic construct
  source 1..16: mol_type = other DNA
gtcggaggacgaggtc

SEQ ID NO: 482 - DNA, 16 bp, synthetic construct
  source 1..16: mol_type = other DNA
agtcggaggacgaggt

SEQ ID NO: 483 - DNA, 16 bp, synthetic construct
  source 1..16: mol_type = other DNA
gagtcggaggacgagg

SEQ ID NO: 484 - DNA, 16 bp, synthetic construct
  source 1..16: mol_type = other DNA
cgagtcggaggacgag

SEQ ID NO: 485 - DNA, 16 bp, synthetic construct
  source 1..16: mol_type = other DNA
agcgagtcggaggacg

SEQ ID NO: 486 - DNA, 16 bp, synthetic construct
  source 1..16: mol_type = other DNA
cagcgagtcggaggac

SEQ ID NO: 487 - DNA, 16 bp, synthetic construct
  source 1..16: mol_type = other DNA
tcagcgagtcggagga

SEQ ID NO: 488 - DNA, 16 bp, synthetic construct
  source 1..16: mol_type = other DNA
tgtcagcgagtcggag

SEQ ID NO: 489 - DNA, 16 bp, synthetic construct
  source 1..16: mol_type = other DNA
ctgtcagcgagtcgga

SEQ ID NO: 490 - DNA, 16 bp, synthetic construct
  source 1..16: mol_type = other DNA
cagtgcatccaaaacg

SEQ ID NO: 491 - DNA, 16 bp, synthetic construct
  source 1..16: mol_type = other DNA
tcagtgcatccaaaac

SEQ ID NO: 492 - DNA, 16 bp, synthetic construct
  source 1..16: mol_type = other DNA
ctcagtgcatccaaaa

SEQ ID NO: 493 - DNA, 16 bp, synthetic construct
  source 1..16: mol_type = other DNA
tctcagtgcatccaaa

SEQ ID NO: 494 - DNA, 16 bp, synthetic construct
  source 1..16: mol_type = other DNA
gtctcagtgcatccaa

SEQ ID NO: 495 - DNA, 16 bp, synthetic construct
  source 1..16: mol_type = other DNA
caataaataccgagga

SEQ ID NO: 496 - DNA, 16 bp, synthetic construct
  source 1..16: mol_type = other DNA
agacaataaataccga

SEQ ID NO: 497 - DNA, 16 bp, synthetic construct
  source 1..16: mol_type = other DNA
cagacaataaataccg

SEQ ID NO: 498 - DNA, 16 bp, synthetic construct
  source 1..16: mol_type = other DNA
cacggaagcacgacac

SEQ ID NO: 499 - DNA, 16 bp, synthetic construct
  source 1..16: mol_type = other DNA
tcacggaagcacgaca

SEQ ID NO: 500 - DNA, 16 bp, synthetic construct
  source 1..16: mol_type = other DNA
ctcacggaagcacgac

SEQ ID NO: 501 - DNA, 16 bp, synthetic construct
  source 1..16: mol_type = other DNA
gtccctctcctcacgg

SEQ ID NO: 502 - DNA, 16 bp, synthetic construct
  source 1..16: mol_type = other DNA
cgtccctctcctcacg

SEQ ID NO: 503 - DNA, 16 bp, synthetic construct
  source 1..16: mol_type = other DNA
cccattcaccaacacg

SEQ ID NO: 504 - DNA, 16 bp, synthetic construct
  source 1..16: mol_type = other DNA
ccccattcaccaacac

SEQ ID NO: 505 - DNA, 16 bp, synthetic construct
  source 1..16: mol_type = other DNA
tccccattcaccaaca

SEQ ID NO: 506 - DNA, 16 bp, synthetic construct
  source 1..16: mol_type = other DNA
gtccccattcaccaac

SEQ ID NO: 507 - DNA, 16 bp, synthetic construct
  source 1..16: mol_type = other DNA
ggtccccattcaccaa

SEQ ID NO: 508 - DNA, 16 bp, synthetic construct
  source 1..16: mol_type = other DNA
cggtccccattcacca

SEQ ID NO: 509 - DNA, 16 bp, synthetic construct
  source 1..16: mol_type = other DNA
ccggtccccattcacc

SEQ ID NO: 510 - DNA, 16 bp, synthetic construct
  source 1..16: mol_type = other DNA
gccggtccccattcac

SEQ ID NO: 511 - DNA, 16 bp, synthetic construct
  source 1..16: mol_type = other DNA
cgccggtccccattca

SEQ ID NO: 512 - DNA, 16 bp, synthetic construct
  source 1..16: mol_type = other DNA
ccgccggtccccattc

SEQ ID NO: 513 - DNA, 16 bp, synthetic construct
  source 1..16: mol_type = other DNA
accgccggtccccatt

SEQ ID NO: 514 - DNA, 16 bp, synthetic construct
  source 1..16: mol_type = other DNA
caccgccggtccccat

SEQ ID NO: 515 - DNA, 16 bp, synthetic construct
  source 1..16: mol_type = other DNA
ccaccgccggtcccca

SEQ ID NO: 516 - DNA, 16 bp, synthetic construct
  source 1..16: mol_type = other DNA
tccaccgccggtcccc

SEQ ID NO: 517 - DNA, 16 bp, synthetic construct
  source 1..16: mol_type = other DNA
atccaccgccggtccc

SEQ ID NO: 518 - DNA, 16 bp, synthetic construct
  source 1..16: mol_type = other DNA
gatccaccgccggtcc

SEQ ID NO: 519 - DNA, 16 bp, synthetic construct
  source 1..16: mol_type = other DNA
tgatccaccgccggtc

SEQ ID NO: 520 - DNA, 16 bp, synthetic construct
  source 1..16: mol_type = other DNA
gtgatccaccgccggt

SEQ ID NO: 521 - DNA, 16 bp, synthetic construct
  source 1..16: mol_type = other DNA
cgtgatccaccgccgg

SEQ ID NO: 522 - DNA, 16 bp, synthetic construct
  source 1..16: mol_type = other DNA
catcctggaaggcgaa

SEQ ID NO: 523 - DNA, 16 bp, synthetic construct
  source 1..16: mol_type = other DNA
tcatcctggaaggcga

SEQ ID NO: 524 - DNA, 16 bp, synthetic construct
  source 1..16: mol_type = other DNA
agttctcatcctggaa

SEQ ID NO: 525 - DNA, 16 bp, synthetic construct
  source 1..16: mol_type = other DNA
tagttctcatcctgga

SEQ ID NO: 526 - DNA, 16 bp, synthetic construct
  source 1..16: mol_type = other DNA
gtagttctcatcctgg

SEQ ID NO: 527 - DNA, 16 bp, synthetic construct
  source 1..16: mol_type = other DNA
caggtacaggtagttc

SEQ ID NO: 528 - DNA, 16 bp, synthetic construct
  source 1..16: mol_type = other DNA
ccaggtacaggtagtt

SEQ ID NO: 529 - DNA, 16 bp, synthetic construct
  source 1..16: mol_type = other DNA
gaccaggtacaggtag

SEQ ID NO: 530 - DNA, 16 bp, synthetic construct
  source 1..16: mol_type = other DNA
ctccatgaccaggtac

SEQ ID NO: 531 - DNA, 16 bp, synthetic construct
  source 1..16: mol_type = other DNA
actccatgaccaggta

SEQ ID NO: 532 - DNA, 16 bp, synthetic construct
  source 1..16: mol_type = other DNA
tactccatgaccaggt

SEQ ID NO: 533 - DNA, 16 bp, synthetic construct
  source 1..16: mol_type = other DNA
atactccatgaccagg

SEQ ID NO: 534 - DNA, 16 bp, synthetic construct
  source 1..16: mol_type = other DNA
aatactccatgaccag

SEQ ID NO: 535 - DNA, 16 bp, synthetic construct
  source 1..16: mol_type = other DNA
taatactccatgacca

SEQ ID NO: 536 - DNA, 16 bp, synthetic construct
  source 1..16: mol_type = other DNA
gtaatactccatgacc

SEQ ID NO: 537 - DNA, 16 bp, synthetic construct
  source 1..16: mol_type = other DNA
cgtaatactccatgac

SEQ ID NO: 538 - DNA, 16 bp, synthetic construct
  source 1..16: mol_type = other DNA
cttgctcagcagtgtc

SEQ ID NO: 539 - DNA, 16 bp, synthetic construct
  source 1..16: mol_type = other DNA
acttgctcagcagtgt

SEQ ID NO: 540 - DNA, 16 bp, synthetic construct
  source 1..16: mol_type = other DNA
aacttgctcagcagtg

SEQ ID NO: 541 - DNA, 16 bp, synthetic construct
  source 1..16: mol_type = other DNA
gctccccaaacttgct

SEQ ID NO: 542 - DNA, 16 bp, synthetic construct
  source 1..16: mol_type = other DNA
cgctccccaaacttgc

SEQ ID NO: 543 - DNA, 16 bp, synthetic construct
  source 1..16: mol_type = other DNA
ccgctccccaaacttg

SEQ ID NO: 544 - DNA, 16 bp, synthetic construct
  source 1..16: mol_type = other DNA
tccgctccccaaactt

SEQ ID NO: 545 - DNA, 16 bp, synthetic construct
  source 1..16: mol_type = other DNA
atccgctccccaaact

SEQ ID NO: 546 - DNA, 16 bp, synthetic construct
  source 1..16: mol_type = other DNA
aatccgctccccaaac

SEQ ID NO: 547 - DNA, 16 bp, synthetic construct
  source 1..16: mol_type = other DNA
gaatccgctccccaaa

SEQ ID NO: 548 - DNA, 16 bp, synthetic construct
  source 1..16: mol_type = other DNA
ggaatccgctccccaa

SEQ ID NO: 549 - DNA, 16 bp, synthetic construct
  source 1..16: mol_type = other DNA
cggaatccgctcccca

SEQ ID NO: 550 - DNA, 16 bp, synthetic construct
  source 1..16: mol_type = other DNA
ccggaatccgctcccc

SEQ ID NO: 551 - DNA, 16 bp, synthetic construct
  source 1..16: mol_type = other DNA
gccggaatccgctccc

SEQ ID NO: 552 - DNA, 16 bp, synthetic construct
  source 1..16: mol_type = other DNA
agaagcgcgccatctc

SEQ ID NO: 553 - DNA, 16 bp, synthetic construct
  source 1..16: mol_type = other DNA
tagaagcgcgccatct

SEQ ID NO: 554 - DNA, 16 bp, synthetic construct
  source 1..16: mol_type = other DNA
gtagaagcgcgccatc

SEQ ID NO: 555 - DNA, 16 bp, synthetic construct
  source 1..16: mol_type = other DNA
ggtagaagcgcgccat

SEQ ID NO: 556 - DNA, 16 bp, synthetic construct
  source 1..16: mol_type = other DNA
aggtagaagcgcgcca

SEQ ID NO: 557 - DNA, 16 bp, synthetic construct
  source 1..16: mol_type = other DNA
caggtagaagcgcgcc

SEQ ID NO: 558 - DNA, 16 bp, synthetic construct
  source 1..16: mol_type = other DNA
ccaggtagaagcgcgc

SEQ ID NO: 559 - DNA, 16 bp, synthetic construct
  source 1..16: mol_type = other DNA
gccaggtagaagcgcg

SEQ ID NO: 560 - DNA, 16 bp, synthetic construct
  source 1..16: mol_type = other DNA
cgccaggtagaagcgc

SEQ ID NO: 561 - DNA, 16 bp, synthetic construct
  source 1..16: mol_type = other DNA
ccgccaggtagaagcg

SEQ ID NO: 562 - DNA, 16 bp, synthetic construct
  source 1..16: mol_type = other DNA
tccgccaggtagaagc

SEQ ID NO: 563 - DNA, 16 bp, synthetic construct
  source 1..16: mol_type = other DNA
tgacaatctccgccag

SEQ ID NO: 564 - DNA, 16 bp, synthetic construct
  source 1..16: mol_type = other DNA
atgacaatctccgcca

SEQ ID NO: 565 - DNA, 16 bp, synthetic construct
  source 1..16: mol_type = other DNA
catgacaatctccgcc

SEQ ID NO: 566 - DNA, 16 bp, synthetic construct
  source 1..16: mol_type = other DNA
ccatgacaatctccgc

SEQ ID NO: 567 - DNA, 16 bp, synthetic construct
  source 1..16: mol_type = other DNA
gccatgacaatctccg

SEQ ID NO: 568 - DNA, 16 bp, synthetic construct
  source 1..16: mol_type = other DNA
ggccatgacaatctcc

SEQ ID NO: 569 - DNA, 16 bp, synthetic construct
  source 1..16: mol_type = other DNA
ccaactgttctcttag

SEQ ID NO: 570 - DNA, 16 bp, synthetic construct
  source 1..16: mol_type = other DNA
aaccaactgttctctt

SEQ ID NO: 571 - DNA, 16 bp, synthetic construct
  source 1..16: mol_type = other DNA
ccagtaataaaagctg

SEQ ID NO: 572 - DNA, 16 bp, synthetic construct
  source 1..16: mol_type = other DNA
gtccagtaataaaagc

SEQ ID NO: 573 - DNA, 16 bp, synthetic construct
  source 1..16: mol_type = other DNA
gttgtccagtaataaa

SEQ ID NO: 574 - DNA, 16 bp, synthetic construct
  source 1..16: mol_type = other DNA
atgttgtccagtaata

SEQ ID NO: 575 - DNA, 16 bp, synthetic construct
  source 1..16: mol_type = other DNA
taatgttgtccagtaa

SEQ ID NO: 576 - DNA, 16 bp, synthetic construct
  source 1..16: mol_type = other DNA
ttcaatcctgacccac

SEQ ID NO: 577 - DNA, 16 bp, synthetic construct
  source 1..16: mol_type = other DNA
ggttcaatcctgaccc

SEQ ID NO: 578 - DNA, 16 bp, synthetic construct
  source 1..16: mol_type = other DNA
tgggttcaatcctgac

SEQ ID NO: 579 - DNA, 16 bp, synthetic construct
  source 1..16: mol_type = other DNA
gatgggttcaatcctg

SEQ ID NO: 580 - DNA, 16 bp, synthetic construct
  source 1..16: mol_type = other DNA
aggatgggttcaatcc

SEQ ID NO: 581 - DNA, 16 bp, synthetic construct
  source 1..16: mol_type = other DNA
agaggatgggttcaat

SEQ ID NO: 582 - DNA, 16 bp, synthetic construct
  source 1..16: mol_type = other DNA
atagaggatgggttca

SEQ ID NO: 583 - DNA, 16 bp, synthetic construct
  source 1..16: mol_type = other DNA
ccctcctgtgggaaca

SEQ ID NO: 584 - DNA, 16 bp, synthetic construct
  source 1..16: mol_type = other DNA
gtccctcctgtgggaa

SEQ ID NO: 585 - DNA, 16 bp, synthetic construct
  source 1..16: mol_type = other DNA
cagtccctcctgtggg

SEQ ID NO: 586 - DNA, 16 bp, synthetic construct
  source 1..16: mol_type = other DNA
agcagtccctcctgtg

SEQ ID NO: 587 - DNA, 16 bp, synthetic construct
  source 1..16: mol_type = other DNA
actcagctgtgggaag

SEQ ID NO: 588 - DNA, 16 bp, synthetic construct
  source 1..16: mol_type = other DNA
cccactcagctgtggg

SEQ ID NO: 589 - DNA, 16 bp, synthetic construct
  source 1..16: mol_type = other DNA
accccactcagctgtg

SEQ ID NO: 590 - DNA, 16 bp, synthetic construct
  source 1..16: mol_type = other DNA
acaccccactcagctg

SEQ ID NO: 591 - DNA, 16 bp, synthetic construct
  source 1..16: mol_type = other DNA
gcacaccccactcagc

SEQ ID NO: 592 - DNA, 16 bp, synthetic construct
  source 1..16: mol_type = other DNA
tcagcacaccccactc

SEQ ID NO: 593 - DNA, 16 bp, synthetic construct
  source 1..16: mol_type = other DNA
gtggtcctaagactgg

SEQ ID NO: 594 - DNA, 16 bp, synthetic construct
  source 1..16: mol_type = other DNA
gatgtggtcctaagac

SEQ ID NO: 595 - DNA, 16 bp, synthetic construct
  source 1..16: mol_type = other DNA
cagatgtggtcctaag

SEQ ID NO: 596 - DNA, 16 bp, synthetic construct
  source 1..16: mol_type = other DNA
cctccacagatgtggt

SEQ ID NO: 597 - DNA, 16 bp, synthetic construct
  source 1..16: mol_type = other DNA
cacctccacagatgtg

SEQ ID NO: 598 - DNA, 16 bp, synthetic construct
  source 1..16: mol_type = other DNA
ggccacctccacagat

SEQ ID NO: 599 - DNA, 16 bp, synthetic construct
  source 1..16: mol_type = other DNA
tgcttggctctggcca

SEQ ID NO: 600 - DNA, 16 bp, synthetic construct
  source 1..16: mol_type = other DNA
actgcttggctctggc

SEQ ID NO: 601 - DNA, 16 bp, synthetic construct
  source 1..16: mol_type = other DNA
agactgcttggctctg

SEQ ID NO: 602 - DNA, 16 bp, synthetic construct
  source 1..16: mol_type = other DNA
ggagactgcttggctc

SEQ ID NO: 603 - DNA, 16 bp, synthetic construct
  source 1..16: mol_type = other DNA
tgcagacccctcttct

SEQ ID NO: 604 - DNA, 16 bp, synthetic construct
  source 1..16: mol_type = other DNA
ctcctcccttgacatg

SEQ ID NO: 605 - DNA, 16 bp, synthetic construct
  source 1..16: mol_type = other DNA
ccagacccccatgttc

SEQ ID NO: 606 - DNA, 16 bp, synthetic construct
  source 1..16: mol_type = other DNA
gtccagacccccatgt

SEQ ID NO: 607 - DNA, 16 bp, synthetic construct
  source 1..16: mol_type = other DNA
gggtccagacccccat

SEQ ID NO: 608 - DNA, 16 bp, synthetic construct
  source 1..16: mol_type = other DNA
accttctgcagggact

SEQ ID NO: 609 - DNA, 16 bp, synthetic construct
  source 1..16: mol_type = other DNA
taaaccttctgcaggg

SEQ ID NO: 610 - DNA, 16 bp, synthetic construct
  source 1..16: mol_type = other DNA
gaaaagccctgcccct

SEQ ID NO: 611 - DNA, 16 bp, synthetic construct
  source 1..16: mol_type = other DNA
taggaaaagccctgcc

SEQ ID NO: 612 - DNA, 16 bp, synthetic construct
  source 1..16: mol_type = other DNA
cttaggaaaagccctg

SEQ ID NO: 613 - DNA, 16 bp, synthetic construct
  source 1..16: mol_type = other DNA
tgcttaggaaaagccc

SEQ ID NO: 614 - DNA, 16 bp, synthetic construct
  source 1..16: mol_type = other DNA
tctgcttaggaaaagc

SEQ ID NO: 615 - DNA, 16 bp, synthetic construct
  source 1..16: mol_type = other DNA
ctcctctgcttaggaa

SEQ ID NO: 616 - DNA, 16 bp, synthetic construct
  source 1..16: mol_type = other DNA
ccctcctctgcttagg

SEQ ID NO: 617 - DNA, 16 bp, synthetic construct
  source 1..16: mol_type = other DNA
ctgatttgaggaaggg

SEQ ID NO: 618 - DNA, 16 bp, synthetic construct
  source 1..16: mol_type = other DNA
tcctgatttgaggaag

SEQ ID NO: 619 - DNA, 16 bp, synthetic construct
  source 1..16: mol_type = other DNA
cctcctgatttgagga

SEQ ID NO: 620 - DNA, 16 bp, synthetic construct
  source 1..16: mol_type = other DNA
gacctcctgatttgag

SEQ ID NO: 621 - DNA, 16 bp, synthetic construct
  source 1..16: mol_type = other DNA
aagacctcctgatttg

SEQ ID NO: 622 - DNA, 16 bp, synthetic construct
  source 1..16: mol_type = other DNA
ccaagacctcctgatt

SEQ ID NO: 623 - DNA, 16 bp, synthetic construct
  source 1..16: mol_type = other DNA
ctgcttccaagacctc

SEQ ID NO: 624 - DNA, 16 bp, synthetic construct
  source 1..16: mol_type = other DNA
agctgcttccaagacc

SEQ ID NO: 625 - DNA, 16 bp, synthetic construct
  source 1..16: mol_type = other DNA
gcagctgcttccaaga

SEQ ID NO: 626 - DNA, 16 bp, synthetic construct
  source 1..16: mol_type = other DNA
ctggtggagaaccaga

SEQ ID NO: 627 - DNA, 16 bp, synthetic construct
  source 1..16: mol_type = other DNA
ctctggtggagaacca

SEQ ID NO: 628 - DNA, 16 bp, synthetic construct
  source 1..16: mol_type = other DNA
ttctctggtggagaac

SEQ ID NO: 629 - DNA, 16 bp, synthetic construct
  source 1..16: mol_type = other DNA
gattctctggtggaga

SEQ ID NO: 630 - DNA, 16 bp, synthetic construct
  source 1..16: mol_type = other DNA
acttactgtttcatcc

SEQ ID NO: 631 - DNA, 16 bp, synthetic construct
  source 1..16: mol_type = other DNA
cggaccccctcccctc

SEQ ID NO: 632 - DNA, 16 bp, synthetic construct
  source 1..16: mol_type = other DNA
gacggaccccctcccc

SEQ ID NO: 633 - DNA, 16 bp, synthetic construct
  source 1..16: mol_type = other DNA
ctgacggaccccctcc

SEQ ID NO: 634 - DNA, 16 bp, synthetic construct
  source 1..16: mol_type = other DNA
ccctgacggaccccct

SEQ ID NO: 635 - DNA, 16 bp, synthetic construct
  source 1..16: mol_type = other DNA
aagccctcaccttttc

SEQ ID NO: 636 - DNA, 16 bp, synthetic construct
  source 1..16: mol_type = other DNA
ggaagccctcaccttt

SEQ ID NO: 637 - DNA, 16 bp, synthetic construct
  source 1..16: mol_type = other DNA
cgggaagccctcacct

SEQ ID NO: 638 - DNA, 16 bp, synthetic construct
  source 1..16: mol_type = other DNA
cccgggaagccctcac

SEQ ID NO: 639 - DNA, 16 bp, synthetic construct
  source 1..16: mol_type = other DNA
cacccgggaagccctc

SEQ ID NO: 640 - DNA, 16 bp, synthetic construct
  source 1..16: mol_type = other DNA
gccacccgggaagccc

SEQ ID NO: 641 - DNA, 16 bp, synthetic construct
  source 1..16: mol_type = other DNA
acgccacccgggaagc

SEQ ID NO: 642 - DNA, 16 bp, synthetic construct
  source 1..16: mol_type = other DNA
ctgttcaggaagtccc

SEQ ID NO: 643 - DNA, 16 bp, synthetic construct
  source 1..16: mol_type = other DNA
ttctgttcaggaagtc

SEQ ID NO: 644 - DNA, 16 bp, synthetic construct
  source 1..16: mol_type = other DNA
gcttctgttcaggaag

SEQ ID NO: 645 - DNA, 16 bp, synthetic construct
  source 1..16: mol_type = other DNA
gcttgggcccacccct

SEQ ID NO: 646 - DNA, 16 bp, synthetic construct
  source 1..16: mol_type = other DNA
aggcttgggcccaccc

SEQ ID NO: 647 - DNA, 16 bp, synthetic construct
  source 1..16: mol_type = other DNA
cgaggcttgggcccac

SEQ ID NO: 648 - DNA, 16 bp, synthetic construct
  source 1..16: mol_type = other DNA
agcgaggcttgggccc

SEQ ID NO: 649 - DNA, 16 bp, synthetic construct
  source 1..16: mol_type = other DNA
agagcgaggcttgggc

SEQ ID NO: 650 - DNA, 16 bp, synthetic construct
  source 1..16: mol_type = other DNA
gcagagcgaggcttgg

SEQ ID NO: 651 - DNA, 16 bp, synthetic construct
  source 1..16: mol_type = other DNA
gagcagagcgaggctt

SEQ ID NO: 652 - DNA, 16 bp, synthetic construct
  source 1..16: mol_type = other DNA
aaaggagcagagcgag

SEQ ID NO: 653 - DNA, 16 bp, synthetic construct
  source 1..16: mol_type = other DNA
caaaaggagcagagcg

SEQ ID NO: 654 - DNA, 16 bp, synthetic construct
  source 1..16: mol_type = other DNA
tggaccaaaaggagca

SEQ ID NO: 655 - DNA, 16 bp, synthetic construct
  source 1..16: mol_type = other DNA
cctggaccaaaaggag

SEQ ID NO: 656 - DNA, 16 bp, synthetic construct
  source 1..16: mol_type = other DNA
cacctggaccaaaagg

SEQ ID NO: 657 - DNA, 16 bp, synthetic construct
  source 1..16: mol_type = other DNA
cgcacctggaccaaaa

SEQ ID NO: 658 - DNA, 16 bp, synthetic construct
  source 1..16: mol_type = other DNA
gaccgcacctggacca

SEQ ID NO: 659 - DNA, 16 bp, synthetic construct
  source 1..16: mol_type = other DNA
accttgtagtggacga

SEQ ID NO: 660 - DNA, 16 bp, synthetic construct
  source 1..16: mol_type = other DNA
tcaccttgtagtggac

SEQ ID NO: 661 - DNA, 16 bp, synthetic construct
  source 1..16: mol_type = other DNA
gctcaccttgtagtgg

SEQ ID NO: 662 - DNA, 16 bp, synthetic construct
  source 1..16: mol_type = other DNA
ggagaggaggcgatag

SEQ ID NO: 663 - DNA, 16 bp, synthetic construct
  source 1..16: mol_type = other DNA
agggagaggaggcgat

SEQ ID NO: 664 - DNA, 16 bp, synthetic construct
  source 1..16: mol_type = other DNA
ctcctgctcagaggga

SEQ ID NO: 665 - DNA, 16 bp, synthetic construct
  source 1..16: mol_type = other DNA
gtgctcctgctcagag

SEQ ID NO: 666 - DNA, 16 bp, synthetic construct
  source 1..16: mol_type = other DNA
aggtgctcctgctcag

SEQ ID NO: 667 - DNA, 16 bp, synthetic construct
  source 1..16: mol_type = other DNA
agaggtgctcctgctc

SEQ ID NO: 668 - DNA, 16 bp, synthetic construct
  source 1..16: mol_type = other DNA
agagaggtgctcctgc

SEQ ID NO: 669 - DNA, 16 bp, synthetic construct
  source 1..16: mol_type = other DNA
accccgcccccgctca

SEQ ID NO: 670 - DNA, 16 bp, synthetic construct
  source 1..16: mol_type = other DNA
ctaccccgcccccgct

SEQ ID NO: 671 - DNA, 16 bp, synthetic construct
  source 1..16: mol_type = other DNA
acctaccccgcccccg

SEQ ID NO: 672 - DNA, 16 bp, synthetic construct
  source 1..16: mol_type = other DNA
gtacctaccccgcccc

SEQ ID NO: 673 - DNA, 16 bp, synthetic construct
  source 1..16: mol_type = other DNA
aggtacctaccccgcc

SEQ ID NO: 674 - DNA, 16 bp, synthetic construct
  source 1..16: mol_type = other DNA
gggaggttcccgcagc

SEQ ID NO: 675 - DNA, 16 bp, synthetic construct
  source 1..16: mol_type = other DNA
gtccttactccaactt

SEQ ID NO: 676 - DNA, 16 bp, synthetic construct
  source 1..16: mol_type = other DNA
ctgtccttactccaac

SEQ ID NO: 677 - DNA, 16 bp, synthetic construct
  source 1..16: mol_type = other DNA
cactgtccttactcca

SEQ ID NO: 678 - DNA, 16 bp, synthetic construct
  source 1..16: mol_type = other DNA
ggcactgtccttactc

SEQ ID NO: 679 - DNA, 16 bp, synthetic construct
  source 1..16: mol_type = other DNA
taggcactgtccttac

SEQ ID NO: 680 - DNA, 16 bp, synthetic construct
  source 1..16: mol_type = other DNA
ggtaggcactgtcctt

SEQ ID NO: 681 - DNA, 16 bp, synthetic construct
  source 1..16: mol_type = other DNA
gtcactgctgggtcct

SEQ ID NO: 682 - DNA, 16 bp, synthetic construct
  source 1..16: mol_type = other DNA
aggtcactgctgggtc

SEQ ID NO: 683 - DNA, 16 bp, synthetic construct
  source 1..16: mol_type = other DNA
ctaggtcactgctggg

SEQ ID NO: 684 - DNA, 16 bp, synthetic construct
  source 1..16: mol_type = other DNA
gtctaggtcactgctg

SEQ ID NO: 685 - DNA, 16 bp, synthetic construct
  source 1..16: mol_type = other DNA
aagtctaggtcactgc

SEQ ID NO: 686 - DNA, 16 bp, synthetic construct
  source 1..16: mol_type = other DNA
gcactccattgtctca

SEQ ID NO: 687 - DNA, 16 bp, synthetic construct
  source 1..16: mol_type = other DNA
ctgcactccattgtct

SEQ ID NO: 688 - DNA, 16 bp, synthetic construct
  source 1..16: mol_type = other DNA
ccctgcactccattgt

SEQ ID NO: 689 - DNA, 16 bp, synthetic construct
  source 1..16: mol_type = other DNA
ccccctgcactccatt

SEQ ID NO: 690 - DNA, 16 bp, synthetic construct
  source 1..16: mol_type = other DNA
cttgctgagtcaggag

SEQ ID NO: 691 - DNA, 16 bp, synthetic construct
  source 1..16: mol_type = other DNA
tccttgctgagtcagg

SEQ ID NO: 692 - DNA, 16 bp, synthetic construct
  source 1..16: mol_type = other DNA
cttccttgctgagtca

SEQ ID NO: 693 - DNA, 16 bp, synthetic construct
  source 1..16: mol_type = other DNA
accttccttgctgagt

SEQ ID NO: 694 - DNA, 16 bp, synthetic construct
  source 1..16: mol_type = other DNA
ggaccttccttgctga

SEQ ID NO: 695 - DNA, 16 bp, synthetic construct
  source 1..16: mol_type = other DNA
caggaccttccttgct

SEQ ID NO: 696 - DNA, 16 bp, synthetic construct
  source 1..16: mol_type = other DNA
agccctccaggacctt

SEQ ID NO: 697 - DNA, 16 bp, synthetic construct
  source 1..16: mol_type = other DNA
tagctccccactccag

SEQ ID NO: 698 - DNA, 16 bp, synthetic construct
  source 1..16: mol_type = other DNA
gatagctccccactcc

SEQ ID NO: 699 - DNA, 16 bp, synthetic construct
  source 1..16: mol_type = other DNA
cagatagctccccact

SEQ ID NO: 700 - DNA, 16 bp, synthetic construct
  source 1..16: mol_type = other DNA
ctcagatagctcccca

SEQ ID NO: 701 - DNA, 16 bp, synthetic construct
  source 1..16: mol_type = other DNA
agctcagatagctccc

SEQ ID NO: 702 - DNA, 16 bp, synthetic construct
  source 1..16: mol_type = other DNA
tcagctcagatagctc

SEQ ID NO: 703 - DNA, 16 bp, synthetic construct
  source 1..16: mol_type = other DNA
tctcagctcagatagc

SEQ ID NO: 704 - DNA, 16 bp, synthetic construct
  source 1..16: mol_type = other DNA
gagtcctctcctgctt

SEQ ID NO: 705 - DNA, 16 bp, synthetic construct
  source 1..16: mol_type = other DNA
ggaggagtcctctcct

SEQ ID NO: 706 - DNA, 16 bp, synthetic construct
  source 1..16: mol_type = other DNA
gaggaggagtcctctc

SEQ ID NO: 707 - DNA, 16 bp, synthetic construct
  source 1..16: mol_type = other DNA
caaaagggcacccaga

SEQ ID NO: 708 - DNA, 16 bp, synthetic construct
  source 1..16: mol_type = other DNA
agcaaaagggcaccca

SEQ ID NO: 709 - DNA, 16 bp, synthetic construct
  source 1..16: mol_type = other DNA
ggatccccagtattgt

SEQ ID NO: 710 - DNA, 16 bp, synthetic construct
  source 1..16: mol_type = other DNA
ctggatccccagtatt

SEQ ID NO: 711 - DNA, 16 bp, synthetic construct
  source 1..16: mol_type = other DNA
tgctggatccccagta

SEQ ID NO: 712 - DNA, 16 bp, synthetic construct
  source 1..16: mol_type = other DNA
attctctagactgcaa

SEQ ID NO: 713 - DNA, 16 bp, synthetic construct
  source 1..16: mol_type = other DNA
taattctctagactgc

SEQ ID NO: 714 - DNA, 16 bp, synthetic construct
  source 1..16: mol_type = other DNA
tctaattctctagact

SEQ ID NO: 715 - DNA, 16 bp, synthetic construct
  source 1..16: mol_type = other DNA
tctctaattctctaga

SEQ ID NO: 716 - DNA, 16 bp, synthetic construct
  source 1..16: mol_type = other DNA
ctccataattctctaa

SEQ ID NO: 717 - DNA, 16 bp, synthetic construct
  source 1..16: mol_type = other DNA
actctccataattctc

SEQ ID NO: 718 - DNA, 16 bp, synthetic construct
  source 1..16: mol_type = other DNA
acactctccataattc

SEQ ID NO: 719 - DNA, 16 bp, synthetic construct
  source 1..16: mol_type = other DNA
ccacactctccataat

SEQ ID NO: 720 - DNA, 16 bp, synthetic construct
  source 1..16: mol_type = other DNA
tgccacactctccata

SEQ ID NO: 721 - DNA, 16 bp, synthetic construct
  source 1..16: mol_type = other DNA
cccatgcccatcctgc

SEQ ID NO: 722 - DNA, 16 bp, synthetic construct
  source 1..16: mol_type = other DNA
ggacagagaaatgttg

SEQ ID NO: 723 - DNA, 16 bp, synthetic construct
  source 1..16: mol_type = other DNA
ggcataggacagagaa

SEQ ID NO: 724 - DNA, 16 bp, synthetic construct
  source 1..16: mol_type = other DNA
gtggcataggacagag

SEQ ID NO: 725 - DNA, 16 bp, synthetic construct
  source 1..16: mol_type = other DNA
tggtggcataggacag

SEQ ID NO: 726 - DNA, 16 bp, synthetic construct
  source 1..16: mol_type = other DNA
cttactctgcccctcc

SEQ ID NO: 727 - DNA, 16 bp, synthetic construct
  source 1..16: mol_type = other DNA
accttactctgcccct

SEQ ID NO: 728 - DNA, 16 bp, synthetic construct
  source 1..16: mol_type = other DNA
tgaccttactctgccc

SEQ ID NO: 729 - DNA, 16 bp, synthetic construct
  source 1..16: mol_type = other DNA
gctgaccttactctgc

SEQ ID NO: 730 - DNA, 16 bp, synthetic construct
  source 1..16: mol_type = other DNA
ctgctgaccttactct

SEQ ID NO: 731 - DNA, 16 bp, synthetic construct
  source 1..16: mol_type = other DNA
ctctgctgaccttact

SEQ ID NO: 732 - DNA, 16 bp, synthetic construct
  source 1..16: mol_type = other DNA
gcctctgctgacctta

SEQ ID NO: 733 - DNA, 16 bp, synthetic construct
  source 1..16: mol_type = other DNA
ccatggctctgagtca

SEQ ID NO: 734 - DNA, 16 bp, synthetic construct
  source 1..16: mol_type = other DNA
agccatggctctgagt

SEQ ID NO: 735 - DNA, 16 bp, synthetic construct
  source 1..16: mol_type = other DNA
taagccatggctctga

SEQ ID NO: 736 - DNA, 16 bp, synthetic construct
  source 1..16: mol_type = other DNA
tagcctgctgtgactc

SEQ ID NO: 737 - DNA, 16 bp, synthetic construct
  source 1..16: mol_type = other DNA
atgggaggctgttggc

SEQ ID NO: 738 - DNA, 16 bp, synthetic construct
  source 1..16: mol_type = other DNA
ccatgggaggctgttg

SEQ ID NO: 739 - DNA, 16 bp, synthetic construct
  source 1..16: mol_type = other DNA
ggccatgggaggctgt

SEQ ID NO: 740 - DNA, 16 bp, synthetic construct
  source 1..16: mol_type = other DNA
gtgcagagaggccatg

SEQ ID NO: 741 - DNA, 16 bp, synthetic construct
  source 1..16: mol_type = other DNA
gagctcccagcatgac

SEQ ID NO: 742 - DNA, 16 bp, synthetic construct
  source 1..16: mol_type = other DNA
agggagctcccagcat

SEQ ID NO: 743 - DNA, 16 bp, synthetic construct
  source 1..16: mol_type = other DNA
gccatagagcccactt

SEQ ID NO: 744 - DNA, 16 bp, synthetic construct
  source 1..16: mol_type = other DNA
gggccatagagcccac

SEQ ID NO: 745 - DNA, 16 bp, synthetic construct
  source 1..16: mol_type = other DNA
atgctggccctcctgg

SEQ ID NO: 746 - DNA, 16 bp, synthetic construct
  source 1..16: mol_type = other DNA
agctgccccatgctgg

SEQ ID NO: 747 - DNA, 16 bp, synthetic construct
  source 1..16: mol_type = other DNA
cgcccctggcagctgc

SEQ ID NO: 748 - DNA, 16 bp, synthetic construct
  source 1..16: mol_type = other DNA
tgcgcccctggcagct

SEQ ID NO: 749 - DNA, 16 bp, synthetic construct
  source 1..16: mol_type = other DNA
gctgcgcccctggcag

SEQ ID NO: 750 - DNA, 16 bp, synthetic construct
  source 1..16: mol_type = other DNA
cggctgcgcccctggc

SEQ ID NO: 751 - DNA, 16 bp, synthetic construct
  source 1..16: mol_type = other DNA
gtcggctgcgcccctg

SEQ ID NO: 752 - DNA, 16 bp, synthetic construct
  source 1..16: mol_type = other DNA
ctgtcggctgcgcccc

SEQ ID NO: 753 - DNA, 16 bp, synthetic construct
  source 1..16: mol_type = other DNA
gcctgtcggctgcgcc

SEQ ID NO: 754 - DNA, 16 bp, synthetic construct
  source 1..16: mol_type = other DNA
ctgcctgtcggctgcg

SEQ ID NO: 755 - DNA, 16 bp, synthetic construct
  source 1..16: mol_type = other DNA
acctgcctgtcggctg

SEQ ID NO: 756 - DNA, 16 bp, synthetic construct
  source 1..16: mol_type = other DNA
acacctgcctgtcggc

SEQ ID NO: 757 - DNA, 16 bp, synthetic construct
  source 1..16: mol_type = other DNA
gaacacctgcctgtcg

SEQ ID NO: 758 - DNA, 16 bp, synthetic construct
  source 1..16: mol_type = other DNA
ccgaacacctgcctgt

SEQ ID NO: 759 - DNA, 16 bp, synthetic construct
  source 1..16: mol_type = other DNA
cgccgaacacctgcct

SEQ ID NO: 760 - DNA, 16 bp, synthetic construct
  source 1..16: mol_type = other DNA
cctgggcacctgttgg

SEQ ID NO: 761 - DNA, 16 bp, synthetic construct
  source 1..16: mol_type = other DNA
gtgcctgggcacctgt

SEQ ID NO: 762 - DNA, 16 bp, synthetic construct
  source 1..16: mol_type = other DNA
cgccctcccagtgcct

SEQ ID NO: 763 - DNA, 16 bp, synthetic construct
  source 1..16: mol_type = other DNA
accgccctcccagtgc

SEQ ID NO: 764 - DNA, 16 bp, synthetic construct
  source 1..16: mol_type = other DNA
tcaccgccctcccagt

SEQ ID NO: 765 - DNA, 16 bp, synthetic construct
  source 1..16: mol_type = other DNA
agtcaccgccctccca

SEQ ID NO: 766 - DNA, 16 bp, synthetic construct
  source 1..16: mol_type = other DNA
tgagtcaccgccctcc

SEQ ID NO: 767 - DNA, 16 bp, synthetic construct
  source 1..16: mol_type = other DNA
cgtgagtcaccgccct

SEQ ID NO: 768 - DNA, 16 bp, synthetic construct
  source 1..16: mol_type = other DNA
caaagctggttctccc

SEQ ID NO: 769 - DNA, 16 bp, synthetic construct
  source 1..16: mol_type = other DNA
tgcaaagctggttctc

SEQ ID NO: 770 - DNA, 16 bp, synthetic construct
  source 1..16: mol_type = other DNA
tctgcaaagctggttc

SEQ ID NO: 771 - DNA, 16 bp, synthetic construct
  source 1..16: mol_type = other DNA
tgtctgcaaagctggt

SEQ ID NO: 772 - DNA, 16 bp, synthetic construct
  source 1..16: mol_type = other DNA
cctgtctgcaaagctg

SEQ ID NO: 773 - DNA, 16 bp, synthetic construct
  source 1..16: mol_type = other DNA
cgcctgtctgcaaagc

SEQ ID NO: 774 - DNA, 16 bp, synthetic construct
  source 1..16: mol_type = other DNA
ttgtccctcctggatc

SEQ ID NO: 775 - DNA, 16 bp, synthetic construct
  source 1..16: mol_type = other DNA
agttgtccctcctgga

SEQ ID NO: 776 - DNA, 16 bp, synthetic construct
  source 1..16: mol_type = other DNA
aaagttgtccctcctg

SEQ ID NO: 777 - DNA, 16 bp, synthetic construct
  source 1..16: mol_type = other DNA
ccaaagttgtccctcc

SEQ ID NO: 778 - DNA, 16 bp, synthetic construct
  source 1..16: mol_type = other DNA
acccaaagttgtccct

SEQ ID NO: 779 - DNA, 16 bp, synthetic construct
  source 1..16: mol_type = other DNA
gaacccaaagttgtcc

SEQ ID NO: 780 - DNA, 16 bp, synthetic construct
  source 1..16: mol_type = other DNA
gaagaacccaaagttg

SEQ ID NO: 781 - DNA, 16 bp, synthetic construct
  source 1..16: mol_type = other DNA
ccagaagaacccaaag

SEQ ID NO: 782 - DNA, 16 bp, synthetic construct
  source 1..16: mol_type = other DNA
cacccagaagaaccca

SEQ ID NO: 783 - DNA, 16 bp, synthetic construct
  source 1..16: mol_type = other DNA
gcagaacctacaaaag

SEQ ID NO: 784 - DNA, 16 bp, synthetic construct
  source 1..16: mol_type = other DNA
gtgcagaacctacaaa

SEQ ID NO: 785 - DNA, 16 bp, synthetic construct
  source 1..16: mol_type = other DNA
gggtgcagaacctaca

SEQ ID NO: 786 - DNA, 16 bp, synthetic construct
  source 1..16: mol_type = other DNA
gtgggtgcagaaccta

SEQ ID NO: 787 - DNA, 16 bp, synthetic construct
  source 1..16: mol_type = other DNA
ccacacggctcatagg

SEQ ID NO: 788 - DNA, 16 bp, synthetic construct
  source 1..16: mol_type = other DNA
acccacacggctcata

SEQ ID NO: 789 - DNA, 16 bp, synthetic construct
  source 1..16: mol_type = other DNA
tgacccacacggctca

SEQ ID NO: 790 - DNA, 16 bp, synthetic construct
  source 1..16: mol_type = other DNA
gctgacccacacggct

SEQ ID NO: 791 - DNA, 16 bp, synthetic construct
  source 1..16: mol_type = other DNA
tggctgacccacacgg

SEQ ID NO: 792 - DNA, 16 bp, synthetic construct
  source 1..16: mol_type = other DNA
ggtggctgacccacac

SEQ ID NO: 793 - DNA, 16 bp, synthetic construct
  source 1..16: mol_type = other DNA
atggtggctgacccac

SEQ ID NO: 794 - DNA, 16 bp, synthetic construct
  source 1..16: mol_type = other DNA
gaatggtggctgaccc

SEQ ID NO: 795 - DNA, 16 bp, synthetic construct
  source 1..16: mol_type = other DNA
ctaaaggacgcaggga

SEQ ID NO: 796 - DNA, 16 bp, synthetic construct
  source 1..16: mol_type = other DNA
aactaaaggacgcagg

SEQ ID NO: 797 - DNA, 16 bp, synthetic construct
  source 1..16: mol_type = other DNA
gagaactaaaggacgc

SEQ ID NO: 798 - DNA, 16 bp, synthetic construct
  source 1..16: mol_type = other DNA
attggtcccaagcccc

SEQ ID NO: 799 - DNA, 16 bp, synthetic construct
  source 1..16: mol_type = other DNA
ccattggtcccaagcc

SEQ ID NO: 800 - DNA, 16 bp, synthetic construct
  source 1..16: mol_type = other DNA
gcccattggtcccaag

SEQ ID NO: 801 - DNA, 16 bp, synthetic construct
  source 1..16: mol_type = other DNA
acgcccattggtccca

SEQ ID NO: 802 - DNA, 16 bp, synthetic construct
  source 1..16: mol_type = other DNA
ccacgcccattggtcc

SEQ ID NO: 803 - DNA, 16 bp, synthetic construct
  source 1..16: mol_type = other DNA
caccacgcccattggt

SEQ ID NO: 804 - DNA, 16 bp, synthetic construct
  source 1..16: mol_type = other DNA
agacccaactccaccc

SEQ ID NO: 805 - DNA, 16 bp, synthetic construct
  source 1..16: mol_type = other DNA
tcacctcgcccctctt

SEQ ID NO: 806 - DNA, 16 bp, synthetic construct
  source 1..16: mol_type = other DNA
cctcacctcgcccctc

SEQ ID NO: 807 - DNA, 16 bp, synthetic construct
  source 1..16: mol_type = other DNA
agcccctcacctcgcc

SEQ ID NO: 808 - DNA, 16 bp, synthetic construct
  source 1..16: mol_type = other DNA
ctcaaagccccccacg

SEQ ID NO: 809 - DNA, 16 bp, synthetic construct
  source 1..16: mol_type = other DNA
atcctcaaagcccccc

SEQ ID NO: 810 - DNA, 16 bp, synthetic construct
  source 1..16: mol_type = other DNA
ggatcctcaaagcccc

SEQ ID NO: 811 - DNA, 16 bp, synthetic construct
  source 1..16: mol_type = other DNA
gcggatcctcaaagcc

SEQ ID NO: 812 - DNA, 16 bp, synthetic construct
  source 1..16: mol_type = other DNA
gcgcggatcctcaaag

SEQ ID NO: 813 - DNA, 16 bp, synthetic construct
  source 1..16: mol_type = other DNA
gggcgcggatcctcaa

SEQ ID NO: 814 - DNA, 16 bp, synthetic construct
  source 1..16: mol_type = other DNA
gagctgcagccggaga

SEQ ID NO: 815 - DNA, 16 bp, synthetic construct
  source 1..16: mol_type = other DNA
aggagctgcagccgga

SEQ ID NO: 816 - DNA, 16 bp, synthetic construct
  source 1..16: mol_type = other DNA
cggaggagctgcagcc

SEQ ID NO: 817 - DNA, 16 bp, synthetic construct
  source 1..16: mol_type = other DNA
acccggaggagctgca

SEQ ID NO: 818 - DNA, 16 bp, synthetic construct
  source 1..16: mol_type = other DNA
gcacccggaggagctg

SEQ ID NO: 819 - DNA, 16 bp, synthetic construct
  source 1..16: mol_type = other DNA
gggcacccggaggagc

SEQ ID NO: 820 - DNA, 16 bp, synthetic construct
  source 1..16: mol_type = other DNA
cagggcacccggagga

SEQ ID NO: 821 - DNA, 16 bp, synthetic construct
  source 1..16: mol_type = other DNA
tgcagggcacccggag

SEQ ID NO: 822 - DNA, 16 bp, synthetic construct
  source 1..16: mol_type = other DNA
cctgcagggcacccgg

SEQ ID NO: 823 - DNA, 16 bp, synthetic construct
  source 1..16: mol_type = other DNA
cgacacctgcagggca

SEQ ID NO: 824 - DNA, 16 bp, synthetic construct
  source 1..16: mol_type = other DNA
cacgacacctgcaggg

SEQ ID NO: 825 - DNA, 16 bp, synthetic construct
  source 1..16: mol_type = other DNA
agcacgacacctgcag

SEQ ID NO: 826 - DNA, 16 bp, synthetic construct
  source 1..16: mol_type = other DNA
gaagcacgacacctgc

SEQ ID NO: 827 - DNA, 16 bp, synthetic construct
  source 1..16: mol_type = other DNA
ccaggtagttctcatc

SEQ ID NO: 828 - DNA, 16 bp, synthetic construct
  source 1..16: mol_type = other DNA
caccaggtagttctca

SEQ ID NO: 829 - DNA, 16 bp, synthetic construct
  source 1..16: mol_type = other DNA
ctcaccaggtagttct

SEQ ID NO: 830 - DNA, 16 bp, synthetic construct
  source 1..16: mol_type = other DNA
agctcaccaggtagtt

SEQ ID NO: 831 - DNA, 16 bp, synthetic construct
  source 1..16: mol_type = other DNA
ggagctcaccaggtag

SEQ ID NO: 832 - DNA, 16 bp, synthetic construct
  source 1..16: mol_type = other DNA
ccggagctcaccaggt

SEQ ID NO: 833 - DNA, 16 bp, synthetic construct
  source 1..16: mol_type = other DNA
gcccggagctcaccag

SEQ ID NO: 834 - DNA, 16 bp, synthetic construct
  source 1..16: mol_type = other DNA
tagagcttcctctccc

SEQ ID NO: 835 - DNA, 16 bp, synthetic construct
  source 1..16: mol_type = other DNA
cctagagcttcctctc

SEQ ID NO: 836 - DNA, 16 bp, synthetic construct
  source 1..16: mol_type = other DNA
atcctagagcttcctc

SEQ ID NO: 837 - DNA, 16 bp, synthetic construct
  source 1..16: mol_type = other DNA
caatcctagagcttcc

SEQ ID NO: 838 - DNA, 16 bp, synthetic construct
  source 1..16: mol_type = other DNA
cccaatcctagagctt

SEQ ID NO: 839 - DNA, 16 bp, synthetic construct
  source 1..16: mol_type = other DNA
cccccaatcctagagc

SEQ ID NO: 840 - DNA, 16 bp, synthetic construct
  source 1..16: mol_type = other DNA
cacccccaatcctaga

SEQ ID NO: 841 - DNA, 16 bp, synthetic construct
  source 1..16: mol_type = other DNA
agcacccccaatccta

SEQ ID NO: 842 - DNA, 16 bp, synthetic construct
  source 1..16: mol_type = other DNA
gcagcacccccaatcc

SEQ ID NO: 843 - DNA, 16 bp, synthetic construct
  source 1..16: mol_type = other DNA
gggcagcacccccaat

SEQ ID NO: 844 - DNA, 16 bp, synthetic construct
  source 1..16: mol_type = other DNA
tgacacaccctcttac

SEQ ID NO: 845 - DNA, 16 bp, synthetic construct
  source 1..16: mol_type = other DNA
cctgacacaccctctt

SEQ ID NO: 846 - DNA, 16 bp, synthetic construct
  source 1..16: mol_type = other DNA
cacctgacacaccctc

SEQ ID NO: 847 - DNA, 16 bp, synthetic construct
  source 1..16: mol_type = other DNA
tccacctgacacaccc

SEQ ID NO: 848 - DNA, 16 bp, synthetic construct
  source 1..16: mol_type = other DNA
catccacctgacacac

SEQ ID NO: 849 - DNA, 16 bp, synthetic construct
  source 1..16: mol_type = other DNA
ctcatccacctgacac

SEQ ID NO: 850 - DNA, 16 bp, synthetic construct
  source 1..16: mol_type = other DNA
ccctcatccacctgac

SEQ ID NO: 851 - DNA, 16 bp, synthetic construct
  source 1..16: mol_type = other DNA
gcccctcatccacctg

SEQ ID NO: 852 - DNA, 16 bp, synthetic construct
  source 1..16: mol_type = other DNA
aggcccctcatccacc

SEQ ID NO: 853 - DNA, 16 bp, synthetic construct
  source 1..16: mol_type = other DNA
gaaggcccctcatcca

SEQ ID NO: 854 - DNA, 16 bp, synthetic construct
  source 1..16: mol_type = other DNA
aggtaagagacccccc

SEQ ID NO: 855 - DNA, 16 bp, synthetic construct
  source 1..16: mol_type = other DNA
ccaggtaagagacccc

SEQ ID NO: 856 - DNA, 16 bp, synthetic construct
  source 1..16: mol_type = other DNA
ttccaggtaagagacc

SEQ ID NO: 857 - DNA, 16 bp, synthetic construct
  source 1..16: mol_type = other DNA
ccattccaggtaagag

SEQ ID NO: 858 - DNA, 16 bp, synthetic construct
  source 1..16: mol_type = other DNA
tcccattccaggtaag

SEQ ID NO: 859 - DNA, 16 bp, synthetic construct
  source 1..16: mol_type = other DNA
tatcccattccaggta

SEQ ID NO: 860 - DNA, 16 bp, synthetic construct
  source 1..16: mol_type = other DNA
cctatcccattccagg

SEQ ID NO: 861 - DNA, 16 bp, synthetic construct
  source 1..16: mol_type = other DNA
gacctatcccattcca

SEQ ID NO: 862 - DNA, 16 bp, synthetic construct
  source 1..16: mol_type = other DNA
aagacctatcccattc

SEQ ID NO: 863 - DNA, 16 bp, synthetic construct
  source 1..16: mol_type = other DNA
tgaagacctatcccat

SEQ ID NO: 864 - DNA, 16 bp, synthetic construct
  source 1..16: mol_type = other DNA
tggccccgttagaatt

SEQ ID NO: 865 - DNA, 16 bp, synthetic construct
  source 1..16: mol_type = other DNA
agtggccccgttagaa

SEQ ID NO: 866 - DNA, 16 bp, synthetic construct
  source 1..16: mol_type = other DNA
gcagtggccccgttag

SEQ ID NO: 867 - DNA, 16 bp, synthetic construct
  source 1..16: mol_type = other DNA
aggcagtggccccgtt

SEQ ID NO: 868 - DNA, 16 bp, synthetic construct
  source 1..16: mol_type = other DNA
ctaggcagtggccccg

SEQ ID NO: 869 - DNA, 16 bp, synthetic construct
  source 1..16: mol_type = other DNA
ccctaggcagtggccc

SEQ ID NO: 870 - DNA, 16 bp, synthetic construct
  source 1..16: mol_type = other DNA
aggtcccagacactcc

SEQ ID NO: 871 - DNA, 16 bp, synthetic construct
  source 1..16: mol_type = other DNA
ataggtcccagacact

SEQ ID NO: 872 - DNA, 16 bp, synthetic construct
  source 1..16: mol_type = other DNA
gaataggtcccagaca

SEQ ID NO: 873 - DNA, 16 bp, synthetic construct
  source 1..16: mol_type = other DNA
gagaataggtcccaga

SEQ ID NO: 874 - DNA, 16 bp, synthetic construct
  source 1..16: mol_type = other DNA
cagagaataggtccca

SEQ ID NO: 875 - protein, 624 aa, Homo sapiens
MSAEVRLRRLQQLVLDPGFLGLEPLLDLLLGVHQELGASELAQDKYVADFLQWAEPIVVRLKEVRLQRDDFEILKVIGRGAFSEVAVVKMKQTGQVYAMKIMNKWDMLKRGEVSCFREERDVLVNGDRRWITQLHFAFQDENYLYLVMEYYVGGDLLTLLSKFGERIPAEMARFYLAEIVMAIDSVHRLGYVHRDIKPDNILLDRCGHIRLADFGSCLKLRADGTVRSLVAVGTPDYLSPEILQAVGGGPGTGSYGPECDWWALGVFAYEMFYGQTPFYADSTAETYGKIVHYKEHLSLPLVDEGVPEEARDFIQRLLCPPETRLGRGGAGDFRTHPFFFGLDWDGLRDSVPPFTPDFEGATDTCNFDLVEDGLTAMETLSDIREGAPLGVHLPFVGYSYSCMALRDSEVPGPTPMELEAEQLLEPHVQAPSLEPSVSPQDETAEVAVPAAVPAAEAEAEVTLRELQEALEEEVLTRQSLSREMEAIRTDNQNFASQLREAEARNRDLEAHVRQLQERMELLQAEGATAVTGVPSPRATDPPSHLDGPPAVAVGQCPLVGPGPMHRRHLLLPARVPRPGLSEALSLLLFAVVLSRAAALGCIGLVAHAGQLTAVWRRPGAARAP

SEQ ID NO: 876 - protein, 631 aa, Mus musculus
MSAEVRLRQLQQLVLDPGFLGLEPLLDLLLGVHQELGASHLAQDKYVADFLQWVEPIAARLKEVRLQRDDFEILKVIGRGAFSEVAVVKMKQTGQVYAMKIMNKWDMLKRGEVSCFREERDVLVKGDRRWITQLHFAFQDENYLYLVMEYYVGGDLLTLLSKFGERIPAEMARFYLAEIVMAIDSVHRLGYVHRDIKPDNILLDRCGHIRLADFGSCLKLQPDGMVRSLVAVGTPDYLSPEILQAVGGGPGAGSYGPECDWWALGVFAYEMFYGQTPFYADSTAETYAKIVHYREHLSLPLADTVVPEEAQDLIRGLLCPAEIRLGRGGAGDFQKHPFFFGLDWEGLRDSVPPFTPDFEGATDTCNFDVVEDRLTAMVSGGGETLSDMQEDMPLGVRLPFVGYSYCCMAFRDNQVPDPTPMELEALQLPVSDLQGLDLQPPVSPPDQVAEEADLVAVPAPVAEAETTVTLQQLQEALEEEVLTRQSLSRELEAIRTANQNFSSQLQEAEVRNRDLEAHVRQLQERMEMLQAPGAAAITGVPSPRATDPPSHLDGPPAVAVGQCPLVGPGPMHRRHLLLPARIPRPGLSEARCLLLFAAALAAAATLGCTGLVAYTGGLTPVWCFPGATFAP

SEQ ID NO: 877 - protein, 537 aa, Mus musculus
MSAEVRLRQLQQLVLDPGFLGLEPLLDLLLGVHQELGASHLAQDKYVADFLQWVEPIAARLKEVRLQRDDFEILKVIGRGAFSEVAVVKMKQTGQVYAMKIMNKWDMLKRGEVSCFREERDVLVKGDRRWITQLHFAFQDENYLYLVMEYYVGGDLLTLLSKFGERIPAEMARFYLAEIVMAIDSVHRLGYVHRDIKPDNILLDRCGHIRLADFGSCLKLQPDGMVRSLVAVGTPDYLSPEILQAVGGGPGAGSYGPECDWWALGVFTYEMFYGQTPFYADSTAETYAKIVHYREHLSLPLADTVVPEEAQDLIRGLLCPAEIRLGRGGAGDFQKHPFFFGLDWEGLRDSVPPFTPDFEGATDTCNFDVVEDRLTAMVSGGGETLSDMQEDMPLGVRLPFVGYSYCCMAFRDNQVPDPTPMELEALQLPVSDLQGLDLQPPVSPPDQVAEEADLVAVPAPVAEAETTVTLQQLQEALEEEVLTRQSLSRELEAIRTANQNFSSQLQEAEVRNRDLEAHVRQLQERMEMLQAPGAADP

SEQ ID NO: 878 - protein, 605 aa, Mus musculus
MSAEVRLRQLQQLVLDPGFLGLEPLLDLLLGVHQELGASHLAQDKYVADFLQWVEPIAARLKEVRLQRDDFEILKVIGRGAFSEVAVVKMKQTGQVYAMKIMNKWDMLKRGEVSCFREERDVLVKGDRRWITQLHFAFQDENYLYLVMEYYVGGDLLTLLSKFGERIPAEMARFYLAEIVMAIDSVHRLGYVHRDIKPDNILLDRCGHIRLADFGSCLKLQPDGMVRSLVAVGTPDYLSPEILQAVGGGPGAGSYGPECDWWALGVFTYEMFYGQTPFYADSTAETYAKIVHYREHLSLPLADTVVPEEAQDLIRGLLCPAEIRLGRGGADFEGATDTCNFDVVEDRLTAMVSGGGETLSDMQEDMPLGVRLPFVGYSYCCMAFRDNQVPDPTPMELEALQLPVSDLQGLDLQPPVSPPDQVAEEADLVAVPAPVAEAETTVTLQQLQEALEEEVLTRQSLSRELEAIRTANQNFSSQLQEAEVRNRDLEAHVRQLQERMEMLQAPGAAAITGVPSPRATDPPSHLDGPPAVAVGQCPLVGPGPMHRRHLLLPARIPRPGLSEARCLLLFAAALAAAATLGCTGLVAYTGGLTPVWCFPGATFAP

SEQ ID NO: 879 - protein, 625 aa, Homo sapiens
MSAEVRLRRLQQLVLDPGFLGLEPLLDLLLGVHQELGASELAQDKYVADFLQWAEPIVVRLKEVRLQRDDFEILKVIGRGAFSEVAVVKMKQTGQVYAMKIMNKWDMLKRGEVSCFREERDVLVNGDRRWITQLHFAFQDENYLYLVMEYYVGGDLLTLLSKFGERIPAEMARFYLAEIVMAIDSVHRLGYVHRDIKPDNILLDRCGHIRLADFGSCLKLRADGTVRSLVAVGTPDYLSPEILQAVGGGPGTGSYGPECDWWALGVFAYEMFYGQTPFYADSTAETYGKIVHYKEHLSLPLVDEGVPEEARDFIQRLLCPPETRLGRGGAGDFRTHPFFFGLDWDGLRDSVPPFTPDFEGATDTCNFDLVEDGLTAMETLSDIREGAPLGVHLPFVGYSYSCMALRDSEVPGPTPMELEAEQLLEPHVQAPSLEPSVSPQDETAEVAVPAAVPAAEAEAEVTLRELQEALEEEVLTRQSLSREMEAIRTDNQNFASQLREAEARNRDLEAHVRQLQERMELLQAEGATAVTGVPSPRATDPPSHMAPRPWLWASARWWGQAPCTAATCCSLPGSLGLAYRRRFPCSCSPLFCLVPPPWAALGWWPTPANSPQSGAAQEPPALPEP

SEQ ID NO: 880 - protein, 377 aa, Homo sapiens
MCDEDETTALVCDNGSGLVKAGFAGDDAPRAVFPSIVGRPRHQGVMVGMGQKDSYVGDEAQSKRGILTLKYPIEHGIITNWDDMEKIWHHTFYNELRVAPEEHPTLLTEAPLNPKANREKMTQIMFETFNVPAMYVAIQAVLSLYASGRTTGIVLDSGDGVTHNVPIYEGYALPHAIMRLDLAGRDLTDYLMKILTERGYSFVTTAEREIVRDIKEKLCYVALDFENEMATAASSSSLEKSYELPDGQVITIGNERFRCPETLFQPSFIGMESAGIHETTYNSIMKCDIDIRKDLYANNVMSGGTTMYPGIADRMQKEITALAPSTMKIKIIAPPERKYSVWIGGSILASLSTFQQMWITKQEYDEAGPSIVHRKCF

SEQ ID NO: 881 - DNA, 16 bp, synthetic construct
  source 1..16: mol_type = other DNA
  modified_base 1: mod_base = OTHER; note = cEt adenosine 3'-phosphorothioate
  modified_base 2: mod_base = OTHER; note = cEt 5-methylcytidine 3'-phosphorothioate
  modified_base 3: mod_base = OTHER; note = cEt adenosine 3'-phosphorothioate
  modified_base 4: mod_base = OTHER; note = 2'-deoxyadenosine 3'-phosphorothioate
  modified_base 5: mod_base = OTHER; note = 2'-deoxythymidine 3'-phosphorothioate
  modified_base 6..8: mod_base = OTHER; note = 2'-deoxyadenosine 3'-phosphorothioate
  modified_base 9: mod_base = OTHER; note = 2'-deoxythymidine 3'-phosphorothioate
  modified_base 10: mod_base = OTHER; note = 2'-deoxyadenosine 3'-phosphorothioate
  modified_base 11..12: mod_base = OTHER; note = 5-methyl-2'-deoxycytidine 3'-phosphorothioate
  modified_base 13: mod_base = OTHER; note = 2'-deoxyguanosine 3'-phosphorothioate
  modified_base 14: mod_base = OTHER; note = cEt adenosine 3'-phosphorothioate
  modified_base 15: mod_base = OTHER; note = cEt guanosine 3'-phosphorothioate
  modified_base 16: mod_base = OTHER; note = cEt guanosine
acaataaataccgagg

SEQ ID NO: 882 - DNA, 16 bp, synthetic construct
  source 1..16: mol_type = other DNA
  modified_base 1: mod_base = OTHER; note = cEt guanosine 3'-phosphorothioate
  modified_base 2: mod_base = OTHER; note = cEt adenosine 3'-phosphorothioate
  modified_base 3: mod_base = OTHER; note = cEt 5-methylcytidine 3'-phosphorothioate
  modified_base 4..5: mod_base = OTHER; note = 2'-deoxyadenosine 3'-phosphorothioate
  modified_base 6: mod_base = OTHER; note = 2'-deoxythymidine 3'-phosphorothioate
  modified_base 7: mod_base = OTHER; note = 5-methyl-2'-deoxycytidine 3'-phosphorothioate
  modified_base 8: mod_base = OTHER; note = 2'-deoxythymidine 3'-phosphorothioate
  modified_base 9..10: mod_base = OTHER; note = 5-methyl-2'-deoxycytidine 3'-phosphorothioate
  modified_base 11: mod_base = OTHER; note = 2'-deoxyguanosine 3'-phosphorothioate
  modified_base 12..13: mod_base = OTHER; note = 5-methyl-2'-deoxycytidine 3'-phosphorothioate
  modified_base 14: mod_base = OTHER; note = cEt adenosine 3'-phosphorothioate
  modified_base 15: mod_base = OTHER; note = cEt guanosine 3'-phosphorothioate
  modified_base 16: mod_base = OTHER; note = cEt guanosine
gacaatctccgccagg

SEQ ID NO: 883 - DNA, 16 bp, synthetic construct
  source 1..16: mol_type = other DNA
  modified_base 1: mod_base = OTHER; note = cEt thymidine 3'-phosphorothioate
  modified_base 2: mod_base = OTHER; note = cEt guanosine 3'-phosphorothioate
  modified_base 3: mod_base = OTHER; note = cEt thymidine 3'-phosphorothioate
  modified_base 4..5: mod_base = OTHER; note = 2'-deoxyadenosine 3'-phosphorothioate
  modified_base 6: mod_base = OTHER; note = 2'-deoxythymidine 3'-phosphorothioate
  modified_base 7: mod_base = OTHER; note = 2'-deoxyguanosine 3'-phosphorothioate
  modified_base 8..9: mod_base = OTHER; note = 2'-deoxythymidine 3'-phosphorothioate
  modified_base 10: mod_base = OTHER; note = 2'-deoxyguanosine 3'-phosphorothioate
  modified_base 11: mod_base = OTHER; note = 2'-deoxythymidine 3'-phosphorothioate
  modified_base 12..13: mod_base = OTHER; note = 5-methyl-2'-deoxycytidine 3'-phosphorothioate
  modified_base 14: mod_base = OTHER; note = cEt adenosine 3'-phosphorothioate
  modified_base 15: mod_base = OTHER; note = cEt guanosine 3'-phosphorothioate
  modified_base 16: mod_base = OTHER; note = cEt thymidine
tgtaatgttgtccagt

SEQ ID NO: 884 - DNA, 16 bp, synthetic construct
  source 1..16: mol_type = other DNA
  modified_base 1..2: mod_base = OTHER; note = cEt adenosine 3'-phosphorothioate
  modified_base 3: mod_base = OTHER; note = cEt guanosine 3'-phosphorothioate
  modified_base 4: mod_base = OTHER; note = 2'-deoxyadenosine 3'-phosphorothioate
  modified_base 5: mod_base = OTHER; note = 5-methyl-2'-deoxycytidine 3'-phosphorothioate
  modified_base 6: mod_base = OTHER; note = 2'-deoxyadenosine 3'-phosphorothioate
  modified_base 7: mod_base = OTHER; note = 2'-deoxyguanosine 3'-phosphorothioate
  modified_base 8..9: mod_base = OTHER; note = 2'-deoxythymidine 3'-phosphorothioate
  modified_base 10: mod_base = OTHER; note = 5-methyl-2'-deoxycytidine 3'-phosphorothioate
  modified_base 11: mod_base = OTHER; note = 2'-deoxythymidine 3'-phosphorothioate
  modified_base 12: mod_base = OTHER; note = 2'-deoxyadenosine 3'-phosphorothioate
  modified_base 13: mod_base = OTHER; note = 2'-deoxyguanosine 3'-phosphorothioate
  modified_base 14..15: mod_base = OTHER; note = cEt guanosine 3'-phosphorothioate
  modified_base 16: mod_base = OTHER; note = cEt thymidine
aagacagttctagggt

SEQ ID NO: 885 - DNA, 16 bp, synthetic construct
  source 1..16: mol_type = other DNA
  modified_base 1: mod_base = OTHER; note = cEt 5-methylcytidine 3'-phosphorothioate
  modified_base 2: mod_base = OTHER; note = cEt guanosine 3'-phosphorothioate
  modified_base 3: mod_base = OTHER; note = cEt adenosine 3'-phosphorothioate
  modified_base 4: mod_base = OTHER; note = 2'-deoxyadenosine 3'-phosphorothioate
  modified_base 5: mod_base = OTHER; note = 2'-deoxyguanosine 3'-phosphorothioate
  modified_base 6: mod_base = OTHER; note = 2'-deoxyadenosine 3'-phosphorothioate
  modified_base 7: mod_base = OTHER; note = 5-methyl-2'-deoxycytidine 3'-phosphorothioate
  modified_base 8: mod_base = OTHER; note = 2'-deoxyadenosine 3'-phosphorothioate
  modified_base 9: mod_base = OTHER; note = 2'-deoxyguanosine 3'-phosphorothioate
  modified_base 10..11: mod_base = OTHER; note = 2'-deoxythymidine 3'-phosphorothioate
  modified_base 12: mod_base = OTHER; note = 5-methyl-2'-deoxycytidine 3'-phosphorothioate
  modified_base 13: mod_base = OTHER; note = 2'-deoxythymidine 3'-phosphorothioate
  modified_base 14: mod_base = OTHER; note = cEt adenosine 3'-phosphorothioate
  modified_base 15: mod_base = OTHER; note = cEt guanosine 3'-phosphorothioate
  modified_base 16: mod_base = OTHER; note = cEt guanosine
cgaagacagttctagg

SEQ ID NO: 886 - DNA, 16 bp, synthetic construct
  source 1..16: mol_type = other DNA
  modified_base 1: mod_base = OTHER; note = cEt guanosine 3'-phosphorothioate
  modified_base 2: mod_base = OTHER; note = cEt thymidine 3'-phosphorothioate
  modified_base 3: mod_base = OTHER; note = cEt 5-methylcytidine 3'-phosphorothioate
  modified_base 4: mod_base = OTHER; note = 2'-deoxyguanosine 3'-phosphorothioate
  modified_base 5..6: mod_base = OTHER; note = 2'-deoxyadenosine 3'-phosphorothioate
  modified_base 7: mod_base = OTHER; note = 2'-deoxyguanosine 3'-phosphorothioate
  modified_base 8: mod_base = OTHER; note = 2'-deoxyadenosine 3'-phosphorothioate
  modified_base 9: mod_base = OTHER; note = 5-methyl-2'-deoxycytidine 3'-phosphorothioate
  modified_base 10: mod_base = OTHER; note = 2'-deoxyadenosine 3'-phosphorothioate
  modified_base 11: mod_base = OTHER; note = 2'-deoxyguanosine 3'-phosphorothioate
  modified_base 12..13: mod_base = OTHER; note = 2'-deoxythymidine 3'-phosphorothioate
  modified_base 14: mod_base = OTHER; note = cEt 5-methylcytidine 3'-phosphorothioate
  modified_base 15: mod_base = OTHER; note = cEt thymidine 3'-phosphorothioate
  modified_base 16: mod_base = OTHER; note = cEt adenosine
gtcgaagacagttcta

SEQ ID NO: 887 - DNA, 16 bp, synthetic construct
  source 1..16: mol_type = other DNA
  modified_base 1: mod_base = OTHER; note = cEt adenosine 3'-phosphorothioate
  modified_base 2: mod_base = OTHER; note = cEt guanosine 3'-phosphorothioate
  modified_base 3: mod_base = OTHER; note = cEt thymidine 3'-phosphorothioate
  modified_base 4: mod_base = OTHER; note = 5-methyl-2'-deoxycytidine 3'-phosphorothioate
  modified_base 5: mod_base = OTHER; note = 2'-deoxyguanosine 3'-phosphorothioate
  modified_base 6..7: mod_base = OTHER; note = 2'-deoxyadenosine 3'-phosphorothioate
  modified_base 8: mod_base = OTHER; note = 2'-deoxyguanosine 3'-phosphorothioate
  modified_base 9: mod_base = OTHER; note = 2'-deoxyadenosine 3'-phosphorothioate
  modified_base 10: mod_base = OTHER; note = 5-methyl-2'-deoxycytidine 3'-phosphorothioate
  modified_base 11: mod_base = OTHER; note = 2'-deoxyadenosine 3'-phosphorothioate
  modified_base 12: mod_base = OTHER; note = 2'-deoxyguanosine 3'-phosphorothioate
  modified_base 13: mod_base = OTHER; note = 2'-deoxythymidine 3'-phosphorothioate
  modified_base 14: mod_base = OTHER; note = cEt thymidine 3'-phosphorothioate
  modified_base 15: mod_base = OTHER; note = cEt 5-methylcytidine 3'-phosphorothioate
  modified_base 16: mod_base = OTHER; note = cEt thymidine
agtcgaagacagttct

SEQ ID NO: 888 - DNA, 16 bp, synthetic construct
  source 1..16: mol_type = other DNA
  modified_base 1: mod_base = OTHER; note = cEt guanosine 3'-phosphorothioate
  modified_base 2: mod_base = OTHER; note = cEt adenosine 3'-phosphorothioate
  modified_base 3: mod_base = OTHER; note = cEt guanosine 3'-phosphorothioate
  modified_base 4: mod_base = OTHER; note = 2'-deoxythymidine 3'-phosphorothioate
  modified_base 5: mod_base = OTHER; note = 5-methyl-2'-deoxycytidine 3'-phosphorothioate
  modified_base 6: mod_base = OTHER; note = 2'-deoxyguanosine 3'-phosphorothioate
  modified_base 7..8: mod_base = OTHER; note = 2'-deoxyadenosine 3'-phosphorothioate
  modified_base 9: mod_base = OTHER; note = 2'-deoxyguanosine 3'-phosphorothioate
  modified_base 10: mod_base = OTHER; note = 2'-deoxyadenosine 3'-phosphorothioate
  modified_base 11: mod_base = OTHER; note = 5-methyl-2'-deoxycytidine 3'-phosphorothioate
  modified_base 12: mod_base = OTHER; note = 2'-deoxyadenosine 3'-phosphorothioate
  modified_base 13: mod_base = OTHER; note = 2'-deoxyguanosine 3'-phosphorothioate
  modified_base 14..15: mod_base = OTHER; note = cEt thymidine 3'-phosphorothioate
  modified_base 16: mod_base = OTHER; note = cEt 5-methylcytidine
gagtcgaagacagttc

SEQ ID NO: 889 - DNA, 16 bp, synthetic construct
  source 1..16: mol_type = other DNA
  modified_base 1: mod_base = OTHER; note = cEt 5-methylcytidine 3'-phosphorothioate
  modified_base 2..3: mod_base = OTHER; note = cEt guanosine 3'-phosphorothioate
  modified_base 4: mod_base = OTHER; note = 2'-deoxyadenosine 3'-phosphorothioate
  modified_base 5: mod_base = OTHER; note = 2'-deoxyguanosine 3'-phosphorothioate
  modified_base 6: mod_base = OTHER; note = 2'-deoxythymidine 3'-phosphorothioate
  modified_base 7: mod_base = OTHER; note = 5-methyl-2'-deoxycytidine 3'-phosphorothioate
  modified_base 8: mod_base = OTHER; note = 2'-deoxyguanosine 3'-phosphorothioate
  modified_base 9..10: mod_base = OTHER; note = 2'-deoxyadenosine 3'-phosphorothioate
  modified_base 11: mod_base = OTHER; note = 2'-deoxyguanosine 3'-phosphorothioate
  modified_base 12: mod_base = OTHER; note = 2'-deoxyadenosine 3'-phosphorothioate
  modified_base 13: mod_base = OTHER; note = 5-methyl-2'-deoxycytidine 3'-phosphorothioate
  modified_base 14: mod_base = OTHER; note = cEt adenosine 3'-phosphorothioate
  modified_base 15: mod_base = OTHER; note = cEt guanosine 3'-phosphorothioate
  modified_base 16: mod_base = OTHER; note = cEt thymidine
cggagtcgaagacagt

SEQ ID NO: 890 - DNA, 16 bp, synthetic construct
  source 1..16: mol_type = other DNA
  modified_base 1..3: mod_base = OTHER; note = cEt 5-methylcytidine 3'-phosphorothioate
  modified_base 4..5: mod_base = OTHER; note = 2'-deoxyguanosine 3'-phosphorothioate
  modified_base 6: mod_base = OTHER; note = 2'-deoxyadenosine 3'-phosphorothioate
  modified_base 7: mod_base = OTHER; note = 2'-deoxyguanosine 3'-phosphorothioate
  modified_base 8: mod_base = OTHER; note = 2'-deoxythymidine 3'-phosphorothioate
  modified_base 9: mod_base = OTHER; note = 5-methyl-2'-deoxycytidine 3'-phosphorothioate
  modified_base 10: mod_base = OTHER; note = 2'-deoxyguanosine 3'-phosphorothioate
  modified_base 11..12: mod_base = OTHER; note = 2'-deoxyadenosine 3'-phosphorothioate
  modified_base 13: mod_base = OTHER; note = 2'-deoxyguanosine 3'-phosphorothioate
  modified_base 14: mod_base = OTHER; note = cEt adenosine 3'-phosphorothioate
  modified_base 15: mod_base = OTHER; note = cEt 5-methylcytidine 3'-phosphorothioate
  modified_base 16: mod_base = OTHER; note = cEt adenosine
cccggagtcgaagaca

SEQ ID NO: 891 - DNA, 16 bp, synthetic construct
  source 1..16: mol_type = other DNA
  modified_base 1..3: mod_base = OTHER; note = cEt 5-methylcytidine 3'-phosphorothioate
  modified_base 4: mod_base = OTHER; note = 5-methyl-2'-deoxycytidine 3'-phosphorothioate
  modified_base 5..6: mod_base = OTHER; note = 2'-deoxyguanosine 3'-phosphorothioate
  modified_base 7: mod_base = OTHER; note = 2'-deoxyadenosine 3'-phosphorothioate
  modified_base 8: mod_base = OTHER; note = 2'-deoxyguanosine 3'-phosphorothioate
  modified_base 9: mod_base = OTHER; note = 2'-deoxythymidine 3'-phosphorothioate
  modified_base 10: mod_base = OTHER; note = 5-methyl-2'-deoxycytidine 3'-phosphorothioate
  modified_base 11: mod_base = OTHER; note = 2'-deoxyguanosine 3'-phosphorothioate
  modified_base 12..13: mod_base = OTHER; note = 2'-deoxyadenosine 3'-phosphorothioate
  modified_base 14: mod_base = OTHER; note = cEt guanosine 3'-phosphorothioate
  modified_base 15: mod_base = OTHER; note = cEt adenosine 3'-phosphorothioate
  modified_base 16: mod_base = OTHER; note = cEt 5-methylcytidine
ccccggagtcgaagac

SEQ ID NO: 892 - DNA, 16 bp, synthetic construct
  source 1..16: mol_type = other DNA
  modified_base 1: mod_base = OTHER; note = cEt guanosine 3'-phosphorothioate
  modified_base 2..3: mod_base = OTHER; note = cEt adenosine 3'-phosphorothioate
  modified_base 4: mod_base = OTHER; note = 5-methyl-2'-deoxycytidine 3'-phosphorothioate
  modified_base 5: mod_base = OTHER; note = 2'-deoxythymidine 3'-phosphorothioate
  modified_base 6..7: mod_base = OTHER; note = 2'-deoxyguanosine 3'-phosphorothioate
  modified_base 8: mod_base = OTHER; note = 5-methyl-2'-deoxycytidine 3'-phosphorothioate
  modified_base 9: mod_base = OTHER; note = 2'-deoxyadenosine 3'-phosphorothioate
  modified_base 10..11: mod_base = OTHER; note = 2'-deoxyguanosine 3'-phosphorothioate
  modified_base 12: mod_base = OTHER; note = 5-methyl-2'-deoxycytidine 3'-phosphorothioate
  modified_base 13: mod_base = OTHER; note = 2'-deoxyguanosine 3'-phosphorothioate
  modified_base 14: mod_base = OTHER; note = cEt guanosine 3'-phosphorothioate
  modified_base 15: mod_base = OTHER; note = cEt thymidine 3'-phosphorothioate
  modified_base 16: mod_base = OTHER; note = cEt thymidine 3'-phosphorothioate
gaactggcaggcggtg

SEQ ID NO: 893 - DNA, 16 bp, synthetic construct
  source 1..16: mol_type = other DNA
  modified_base 1: mod_base = OTHER; note = cEt thymidine 3'-phosphorothioate
  modified_base 2: mod_base = OTHER; note = cEt guanosine 3'-phosphorothioate
  modified_base 3: mod_base = OTHER; note = cEt thymidine 3'-phosphorothioate
  modified_base 4: mod_base = OTHER; note = 2'-deoxyguanosine 3'-phosphorothioate
  modified_base 5..6: mod_base = OTHER; note = 2'-deoxyadenosine 3'-phosphorothioate
  modified_base 7: mod_base = OTHER; note = 5-methyl-2'-deoxycytidine 3'-phosphorothioate
  modified_base 8: mod_base = OTHER; note = 2'-deoxythymidine 3'-phosphorothioate
  modified_base 9..10: mod_base = OTHER; note = 2'-deoxyguanosine 3'-phosphorothioate
  modified_base 11: mod_base = OTHER; note = 5-methyl-2'-deoxycytidine 3'-phosphorothioate
  modified_base 12: mod_base = OTHER; note = 2'-deoxyadenosine 3'-phosphorothioate
  modified_base 13: mod_base = OTHER; note = 2'-deoxyguanosine 3'-phosphorothioate
  modified_base 14: mod_base = OTHER; note = cEt guanosine 3'-phosphorothioate
  modified_base 15: mod_base = OTHER; note = cEt 5-methylcytidine 3'-phosphorothioate
  modified_base 16: mod_base = OTHER; note = cEt guanosine
tgtgaactggcaggcg

SEQ ID NO: 894 - DNA, 16 bp, synthetic construct
  source 1..16: mol_type = other DNA
  modified_base 1..2: mod_base = OTHER; note = cEt guanosine 3'-phosphorothioate
  modified_base 3: mod_base = OTHER; note = cEt thymidine 3'-phosphorothioate
  modified_base 4: mod_base = OTHER; note = 2'-deoxythymidine 3'-phosphorothioate
  modified_base 5: mod_base = OTHER; note = 2'-deoxyguanosine 3'-phosphorothioate
  modified_base 6: mod_base = OTHER; note = 2'-deoxythymidine 3'-phosphorothioate
  modified_base 7: mod_base = OTHER; note = 2'-deoxyguanosine 3'-phosphorothioate
  modified_base 8..9: mod_base = OTHER; note = 2'-deoxyadenosine 3'-phosphorothioate
  modified_base 10: mod_base = OTHER; note = 5-methyl-2'-deoxycytidine 3'-phosphorothioate
  modified_base 11: mod_base = OTHER; note = 2'-deoxythymidine 3'-phosphorothioate
  modified_base 12..13: mod_base = OTHER; note = 2'-deoxyguanosine 3'-phosphorothioate
  modified_base 14: mod_base = OTHER; note = cEt 5-methylcytidine 3'-phosphorothioate
  modified_base 15: mod_base = OTHER; note = cEt adenosine 3'-phosphorothioate
  modified_base 16: mod_base = OTHER; note = cEt guanosine
ggttgtgaactggcag

SEQ ID NO: 895 - DNA, 16 bp, synthetic construct
  source 1..16: mol_type = other DNA
  modified_base 1: mod_base = OTHER; note = cEt guanosine 3'-phosphorothioate
  modified_base 2: mod_base = OTHER; note = cEt adenosine 3'-phosphorothioate
  modified_base 3: mod_base = OTHER; note = cEt guanosine 3'-phosphorothioate
  modified_base 4: mod_base = OTHER; note = 5-methyl-2'-deoxycytidine 3'-phosphorothioate
  modified_base 5..6: mod_base = OTHER; note = 2'-deoxyguanosine 3'-phosphorothioate
  modified_base 7..8: mod_base = OTHER; note = 2'-deoxythymidine 3'-phosphorothioate
  modified_base 9: mod_base = OTHER; note = 2'-deoxyguanosine 3'-phosphorothioate
  modified_base 10: mod_base = OTHER; note = 2'-deoxythymidine 3'-phosphorothioate
  modified_base 11: mod_base = OTHER; note = 2'-deoxyguanosine 3'-phosphorothioate
  modified_base 12..13: mod_base = OTHER; note = 2'-deoxyadenosine 3'-phosphorothioate
  modified_base 14: mod_base = OTHER; note = cEt 5-methylcytidine 3'-phosphorothioate
  modified_base 15: mod_base = OTHER; note = cEt thymidine 3'-phosphorothioate
  modified_base 16: mod_base = OTHER; note = cEt guanosine
gagcggttgtgaactg

SEQ ID NO: 896 - DNA, 16 bp, synthetic construct
  source 1..16: mol_type = other DNA
  modified_base 1: mod_base = OTHER; note = cEt adenosine 3'-phosphorothioate
  modified_base 2: mod_base = OTHER; note = cEt 5-methylcytidine 3'-phosphorothioate
  modified_base 3: mod_base = OTHER; note = cEt thymidine 3'-phosphorothioate
  modified_base 4..5: mod_base = OTHER; note = 2'-deoxyguanosine 3'-phosphorothioate
  modified_base 6: mod_base = OTHER; note = 2'-deoxyadenosine 3'-phosphorothioate
  modified_base 7: mod_base = OTHER; note = 2'-deoxyguanosine 3'-phosphorothioate
  modified_base 8: mod_base = OTHER; note = 5-methyl-2'-deoxycytidine 3'-phosphorothioate
  modified_base 9: mod_base = OTHER; note = 2'-deoxythymidine 3'-phosphorothioate
  modified_base 10..12: mod_base = OTHER; note = 2'-deoxyguanosine 3'-phosphorothioate
  modified_base 13: mod_base = OTHER; note = 5-methyl-2'-deoxycytidine 3'-phosphorothioate
  modified_base 14..15: mod_base = OTHER; note = cEt guanosine 3'-phosphorothioate
  modified_base 16: mod_base = OTHER; note = cEt adenosine
actggagctgggcgga

SEQ ID NO: 897 - DNA, 16 bp, synthetic construct
  source 1..16: mol_type = other DNA
  modified_base 1: mod_base = OTHER; note = cEt adenosine 3'-phosphorothioate
  modified_base 2..3: mod_base = OTHER; note = cEt guanosine 3'-phosphorothioate
  modified_base 4: mod_base = OTHER; note = 2'-deoxyadenosine 3'-phosphorothioate
  modified_base 5: mod_base = OTHER; note = 5-methyl-2'-deoxycytidine 3'-phosphorothioate
  modified_base 6: mod_base = OTHER; note = 2'-deoxythymidine 3'-phosphorothioate
  modified_base 7..8: mod_base = OTHER; note = 2'-deoxyguanosine 3'-phosphorothioate
  modified_base 9: mod_base = OTHER; note = 2'-deoxyadenosine 3'-phosphorothioate
  modified_base 10: mod_base = OTHER; note = 2'-deoxyguanosine 3'-phosphorothioate
  modified_base 11: mod_base = OTHER; note = 5-methyl-2'-deoxycytidine 3'-phosphorothioate
  modified_base 12: mod_base = OTHER; note = 2'-deoxythymidine 3'-phosphorothioate
  modified_base 13: mod_base = OTHER; note = 2'-deoxyguanosine 3'-phosphorothioate
  modified_base 14..15: mod_base = OTHER; note = cEt guanosine 3'-phosphorothioate
  modified_base 16: mod_base = OTHER; note = cEt 5-methylcytidine
aggactggagctgggc

SEQ ID NO: 898 - DNA, 16 bp, synthetic construct
  source 1..16: mol_type = other DNA
  modified_base 1: mod_base = OTHER; note = cEt thymidine 3'-phosphorothioate
  modified_base 2: mod_base = OTHER; note = cEt 5-methylcytidine 3'-phosphorothioate
  modified_base 3: mod_base = OTHER; note = cEt adenosine 3'-phosphorothioate
  modified_base 4: mod_base = OTHER; note = 5-methyl-2'-deoxycytidine 3'-phosphorothioate
  modified_base 5: mod_base = OTHER; note = 2'-deoxyadenosine 3'-phosphorothioate
  modified_base 6..7: mod_base = OTHER; note = 2'-deoxyguanosine 3'-phosphorothioate
  modified_base 8: mod_base = OTHER; note = 2'-deoxyadenosine 3'-phosphorothioate
  modified_base 9: mod_base = OTHER; note = 5-methyl-2'-deoxycytidine 3'-phosphorothioate
  modified_base 10: mod_base = OTHER; note = 2'-deoxythymidine 3'-phosphorothioate
  modified_base 11..12: mod_base = OTHER; note = 2'-deoxyguanosine 3'-phosphorothioate
  modified_base 13: mod_base = OTHER; note = 2'-deoxyadenosine 3'-phosphorothioate
  modified_base 14: mod_base = OTHER; note = cEt guanosine 3'-phosphorothioate
  modified_base 15: mod_base = OTHER; note = cEt 5-methylcytidine 3'-phosphorothioate
  modified_base 16: mod_base = OTHER; note = cEt thymidine
tcacaggactggagct

SEQ ID NO: 899 - DNA, 16 bp, synthetic construct
  source 1..16: mol_type = other DNA
  modified_base 1: mod_base = OTHER; note = cEt adenosine 3'-phosphorothioate
  modified_base 2: mod_base = OTHER; note = cEt thymidine 3'-phosphorothioate
  modified_base 3: mod_base = OTHER; note = cEt 5-methylcytidine 3'-phosphorothioate
  modified_base 4: mod_base = OTHER; note = 2'-deoxyadenosine 3'-phosphorothioate
  modified_base 5: mod_base = OTHER; note = 5-methyl-2'-deoxycytidine 3'-phosphorothioate
  modified_base 6: mod_base = OTHER; note = 2'-deoxyadenosine 3'-phosphorothioate
  modified_base 7..8: mod_base = OTHER; note = 2'-deoxyguanosine 3'-phosphorothioate
  modified_base 9: mod_base = OTHER; note = 2'-deoxyadenosine 3'-phosphorothioate
  modified_base 10: mod_base = OTHER; note = 5-methyl-2'-deoxycytidine 3'-phosphorothioate
  modified_base 11: mod_base = OTHER; note = 2'-deoxythymidine 3'-phosphorothioate
  modified_base 12..13: mod_base = OTHER; note = 2'-deoxyguanosine 3'-phosphorothioate
  modified_base 14: mod_base = OTHER; note = cEt adenosine 3'-phosphorothioate
  modified_base 15: mod_base = OTHER; note = cEt guanosine 3'-phosphorothioate
  modified_base 16: mod_base = OTHER; note = cEt 5-methylcytidine
atcacaggactggagc

SEQ ID NO: 900 - DNA, 16 bp, synthetic construct
  source 1..16: mol_type = other DNA
  modified_base 1..2: mod_base = OTHER; note = cEt guanosine 3'-phosphorothioate
  modified_base 3: mod_base = OTHER; note = cEt adenosine 3'-phosphorothioate
  modified_base 4: mod_base = OTHER; note = 2'-deoxythymidine 3'-phosphorothioate
  modified_base 5: mod_base = OTHER; note = 5-methyl-2'-deoxycytidine 3'-phosphorothioate
  modified_base 6: mod_base = OTHER; note = 2'-deoxyadenosine 3'-phosphorothioate
  modified_base 7: mod_base = OTHER; note = 5-methyl-2'-deoxycytidine 3'-phosphorothioate
  modified_base 8: mod_base = OTHER; note = 2'-deoxyadenosine 3'-phosphorothioate
  modified_base 9..10: mod_base = OTHER; note = 2'-deoxyguanosine 3'-phosphorothioate
  modified_base 11: mod_base = OTHER; note = 2'-deoxyadenosine 3'-phosphorothioate
  modified_base 12: mod_base = OTHER; note = 5-methyl-2'-deoxycytidine 3'-phosphorothioate
  modified_base 13: mod_base = OTHER; note = 2'-deoxythymidine 3'-phosphorothioate
  modified_base 14..15: mod_base = OTHER; note = cEt guanosine 3'-phosphorothioate
  modified_base 16: mod_base = OTHER; note = cEt adenosine
ggatcacaggactgga

SEQ ID NO: 901 - DNA, 16 bp, synthetic construct
  source 1..16: mol_type = other DNA
  modified_base 1: mod_base = OTHER; note = cEt 5-methylcytidine 3'-phosphorothioate
  modified_base 2: mod_base = OTHER; note = cEt adenosine 3'-phosphorothioate
  modified_base 3: mod_base = OTHER; note = cEt guanosine 3'-phosphorothioate
  modified_base 4..5: mod_base = OTHER; note = 5-methyl-2'-deoxycytidine 3'-phosphorothioate
  modified_base 6: mod_base = OTHER; note = 2'-deoxythymidine 3'-phosphorothioate
  modified_base 7..8: mod_base = OTHER; note = 2'-deoxyguanosine 3'-phosphorothioate
  modified_base 9..10: mod_base = OTHER; note = 5-methyl-2'-deoxycytidine 3'-phosphorothioate
  modified_base 11: mod_base = OTHER; note = 2'-deoxyguanosine 3'-phosphorothioate
  modified_base 12..13: mod_base = OTHER; note = 2'-deoxyadenosine 3'-phosphorothioate
  modified_base 14: mod_base = OTHER; note = cEt adenosine 3'-phosphorothioate
  modified_base 15: mod_base = OTHER; note = cEt guanosine 3'-phosphorothioate
  modified_base 16: mod_base = OTHER; note = cEt adenosine
cagcctggccgaaaga

SEQ ID NO: 902 - DNA, 16 bp, synthetic construct
  source 1..16: mol_type = other DNA
  modified_base 1: mod_base = OTHER; note = cEt 5-methylcytidine 3'-phosphorothioate
  modified_base 2: mod_base = OTHER; note = cEt thymidine 3'-phosphorothioate
  modified_base 3: mod_base = OTHER; note = cEt 5-methylcytidine 3'-phosphorothioate
  modified_base 4: mod_base = OTHER; note = 2'-deoxyadenosine 3'-phosphorothioate
  modified_base 5: mod_base = OTHER; note = 2'-deoxyguanosine 3'-phosphorothioate
  modified_base 6..7: mod_base = OTHER; note = 5-methyl-2'-deoxycytidine 3'-phosphorothioate
  modified_base 8: mod_base = OTHER; note = 2'-deoxythymidine 3'-phosphorothioate
  modified_base 9..10: mod_base = OTHER; note = 2'-deoxyguanosine 3'-phosphorothioate
  modified_base 11..12: mod_base = OTHER; note = 5-methyl-2'-deoxycytidine 3'-phosphorothioate
  modified_base 13: mod_base = OTHER; note = 2'-deoxyguanosine 3'-phosphorothioate
  modified_base 14..15: mod_base = OTHER; note = cEt adenosine 3'-phosphorothioate
  modified_base 16: mod_base = OTHER; note = cEt adenosine
ctcagcctggccgaaa

SEQ ID NO: 903 - DNA, 16 bp, synthetic construct
  source 1..16: mol_type = other DNA
  modified_base 1: mod_base = OTHER; note = cEt guanosine 3'-phosphorothioate
  modified_base 2: mod_base = OTHER; note = cEt thymidine 3'-phosphorothioate
  modified_base 3: mod_base = OTHER; note = cEt 5-methylcytidine 3'-phosphorothioate
  modified_base 4: mod_base = OTHER; note = 2'-deoxyadenosine 3'-phosphorothioate
  modified_base 5..7: mod_base = OTHER; note = 2'-deoxyguanosine 3'-phosphorothioate
  modified_base 8..9: mod_base = OTHER; note = 5-methyl-2'-deoxycytidine 3'-phosphorothioate
  modified_base 10: mod_base = OTHER; note = 2'-deoxythymidine 3'-phosphorothioate
  modified_base 11: mod_base = OTHER; note = 5-methyl-2'-deoxycytidine 3'-phosphorothioate
  modified_base 12: mod_base = OTHER; note = 2'-deoxyadenosine 3'-phosphorothioate
  modified_base 13: mod_base = OTHER; note = 2'-deoxyguanosine 3'-phosphorothioate
  modified_base 14..15: mod_base = OTHER; note = cEt 5-methylcytidine 3'-phosphorothioate
  modified_base 16: mod_base = OTHER; note = cEt thymidine
gtcagggcctcagcct

SEQ ID NO: 904 - DNA, 16 bp, synthetic construct
  source 1..16: mol_type = other DNA
  modified_base 1: mod_base = OTHER; note = cEt 5-methylcytidine 3'-phosphorothioate
  modified_base 2: mod_base = OTHER; note = cEt guanosine 3'-phosphorothioate
  modified_base 3: mod_base = OTHER; note = cEt thymidine 3'-phosphorothioate
  modified_base 4: mod_base = OTHER; note = 5-methyl-2'-deoxycytidine 3'-phosphorothioate
  modified_base 5: mod_base = OTHER; note = 2'-deoxyadenosine 3'-phosphorothioate
  modified_base 6..8: mod_base = OTHER; note = 2'-deoxyguanosine 3'-phosphorothioate
  modified_base 9..10: mod_base = OTHER; note = 5-methyl-2'-deoxycytidine 3'-phosphorothioate
  modified_base 11: mod_base = OTHER; note = 2'-deoxythymidine 3'-phosphorothioate
  modified_base 12: mod_base = OTHER; note = 5-methyl-2'-deoxycytidine 3'-phosphorothioate
  modified_base 13: mod_base = OTHER; note = 2'-deoxyadenosine 3'-phosphorothioate
  modified_base 14: mod_base = OTHER; note = cEt guanosine 3'-phosphorothioate
  modified_base 15: mod_base = OTHER; note = cEt 5-methylcytidine 3'-phosphorothioate
  modified_base 16: mod_base = OTHER; note = cEt 5-methylcytidine
cgtcagggcctcagcc

SEQ ID NO: 905 - DNA, 16 bp, synthetic construct
  source 1..16: mol_type = other DNA
  modified_base 1..3: mod_base = OTHER; note = cEt thymidine 3'-phosphorothioate
  modified_base 4: mod_base = OTHER; note = 2'-deoxyguanosine 3'-phosphorothioate
  modified_base 5: mod_base = OTHER; note = 5-methyl-2'-deoxycytidine 3'-phosphorothioate
  modified_base 6: mod_base = OTHER; note = 2'-deoxyadenosine 3'-phosphorothioate
  modified_base 7: mod_base = OTHER; note = 5-methyl-2'-deoxycytidine 3'-phosphorothioate
  modified_base 8..10: mod_base = OTHER; note = 2'-deoxythymidine 3'-phosphorothioate
  modified_base 11: mod_base = OTHER; note = 2'-deoxyguanosine 3'-phosphorothioate
  modified_base 12: mod_base = OTHER; note = 5-methyl-2'-deoxycytidine 3'-phosphorothioate
  modified_base 13: mod_base = OTHER; note = 2'-deoxyguanosine 3'-phosphorothioate
  modified_base 14..15: mod_base = OTHER; note = cEt adenosine 3'-phosphorothioate
  modified_base 16: mod_base = OTHER; note = cEt 5-methylcytidine
tttgcactttgcgaac

SEQ ID NO: 906 - DNA, 16 bp, synthetic construct
  source 1..16: mol_type = other DNA
  modified_base 1: mod_base = OTHER; note = cEt guanosine 3'-phosphorothioate
  modified_base 2..3: mod_base = OTHER; note = cEt adenosine 3'-phosphorothioate
  modified_base 4: mod_base = OTHER; note = 2'-deoxyadenosine 3'-phosphorothioate
  modified_base 5: mod_base = OTHER; note = 2'-deoxyguanosine 3'-phosphorothioate
  modified_base 6: mod_base = OTHER; note = 5-methyl-2'-deoxycytidine 3'-phosphorothioate
  modified_base 7..9: mod_base = OTHER; note = 2'-deoxythymidine 3'-phosphorothioate
  modified_base 10: mod_base = OTHER; note = 2'-deoxyguanosine 3'-phosphorothioate
  modified_base 11: mod_base = OTHER; note = 5-methyl-2'-deoxycytidine 3'-phosphorothioate
  modified_base 12: mod_base = OTHER; note = 2'-deoxyadenosine 3'-phosphorothioate
  modified_base 13: mod_base = OTHER; note = 5-methyl-2'-deoxycytidine 3'-phosphorothioate
  modified_base 14..15: mod_base = OTHER; note = cEt thymidine 3'-phosphorothioate
  modified_base 16: mod_base = OTHER; note = cEt thymidine
gaaagctttgcacttt

SEQ ID NO: 907 - DNA, 16 bp, synthetic construct
  source 1..16: mol_type = other DNA
  modified_base 1..2: mod_base = OTHER; note = cEt adenosine 3'-phosphorothioate
  modified_base 3: mod_base = OTHER; note = cEt thymidine 3'-phosphorothioate
  modified_base 4..5: mod_base = OTHER; note = 2'-deoxythymidine 3'-phosphorothioate
  modified_base 6..8: mod_base = OTHER; note = 5-methyl-2'-deoxycytidine 3'-phosphorothioate
  modified_base 9: mod_base = OTHER; note = 2'-deoxyguanosine 3'-phosphorothioate
  modified_base 10: mod_base = OTHER; note = 2'-deoxyadenosine 3'-phosphorothioate
  modified_base 11: mod_base = OTHER; note = 2'-deoxyguanosine 3'-phosphorothioate
  modified_base 12: mod_base = OTHER; note = 2'-deoxythymidine 3'-phosphorothioate
  modified_base 13: mod_base = OTHER; note = 2'-deoxyadenosine 3'-phosphorothioate
  modified_base 14: mod_base = OTHER; note = cEt adenosine 3'-phosphorothioate
  modified_base 15: mod_base = OTHER; note = cEt guanosine 3'-phosphorothioate
  modified_base 16: mod_base = OTHER; note = cEt 5-methylcytidine
aatttcccgagtaagc

SEQ ID NO: 908 - DNA, 16 bp, synthetic construct
  source 1..16: mol_type = other DNA
  modified_base 1: mod_base = OTHER; note = cEt guanosine 3'-phosphorothioate
  modified_base 2: mod_base = OTHER; note = cEt 5-methylcytidine 3'-phosphorothioate
  modified_base 3: mod_base = OTHER; note = cEt adenosine 3'-phosphorothioate
  modified_base 4..5: mod_base = OTHER; note = 2'-deoxyadenosine 3'-phosphorothioate
  modified_base 6..8: mod_base = OTHER; note = 2'-deoxythymidine 3'-phosphorothioate
  modified_base 9..11: mod_base = OTHER; note = 5-methyl-2'-deoxycytidine 3'-phosphorothioate
  modified_base 12: mod_base = OTHER; note = 2'-deoxyguanosine 3'-phosphorothioate
  modified_base 13: mod_base = OTHER; note = 2'-deoxyadenosine 3'-phosphorothioate
  modified_base 14: mod_base = OTHER; note = cEt guanosine 3'-phosphorothioate
  modified_base 15: mod_base = OTHER; note = cEt thymidine 3'-phosphorothioate
  modified_base 16: mod_base = OTHER; note = cEt adenosine
gcaaatttcccgagta

SEQ ID NO: 909 - DNA, 16 bp, synthetic construct
  source 1..16: mol_type = other DNA
  modified_base 1: mod_base = OTHER; note = cEt adenosine 3'-phosphorothioate
  modified_base 2: mod_base = OTHER; note = cEt guanosine 3'-phosphorothioate
  modified_base 3: mod_base = OTHER; note = cEt 5-methylcytidine 3'-phosphorothioate
  modified_base 4..6: mod_base = OTHER; note = 2'-deoxyadenosine 3'-phosphorothioate
  modified_base 7..9: mod_base = OTHER; note = 2'-deoxythymidine 3'-phosphorothioate
  modified_base 10..12: mod_base = OTHER; note = 5-methyl-2'-deoxycytidine 3'-phosphorothioate
  modified_base 13: mod_base = OTHER; note = 2'-deoxyguanosine 3'-phosphorothioate
  modified_base 14: mod_base = OTHER; note = cEt adenosine 3'-phosphorothioate
  modified_base 15: mod_base = OTHER; note = cEt guanosine 3'-phosphorothioate
  modified_base 16: mod_base = OTHER; note = cEt thymidine
agcaaatttcccgagt

SEQ ID NO: 910 - DNA, 16 bp, synthetic construct
  source 1..16: mol_type = other DNA
  modified_base 1..2: mod_base = OTHER; note = cEt adenosine 3'-phosphorothioate
  modified_base 3: mod_base = OTHER; note = cEt guanosine 3'-phosphorothioate
  modified_base 4: mod_base = OTHER; note = 5-methyl-2'-deoxycytidine 3'-phosphorothioate
  modified_base 5..7: mod_base = OTHER; note = 2'-deoxyadenosine 3'-phosphorothioate
  modified_base 8..10: mod_base = OTHER; note = 2'-deoxythymidine 3'-phosphorothioate
  modified_base 11..13: mod_base = OTHER; note = 5-methyl-2'-deoxycytidine 3'-phosphorothioate
  modified_base 14: mod_base = OTHER; note = cEt guanosine 3'-phosphorothioate
  modified_base 15: mod_base = OTHER; note = cEt adenosine 3'-phosphorothioate
  modified_base 16: mod_base = OTHER; note = cEt guanosine
aagcaaatttcccgag

SEQ ID NO: 911 - DNA, 16 bp, synthetic construct
  source 1..16: mol_type = other DNA
  modified_base 1..3: mod_base = OTHER; note = cEt adenosine 3'-phosphorothioate
  modified_base 4: mod_base = OTHER; note = 2'-deoxyguanosine 3'-phosphorothioate
  modified_base 5: mod_base = OTHER; note = 5-methyl-2'-deoxycytidine 3'-phosphorothioate
  modified_base 6..8: mod_base = OTHER; note = 2'-deoxyadenosine 3'-phosphorothioate
  modified_base 9..11: mod_base = OTHER; note = 2'-deoxythymidine 3'-phosphorothioate
  modified_base 12..13: mod_base = OTHER; note = 5-methyl-2'-deoxycytidine 3'-phosphorothioate
  modified_base 14: mod_base = OTHER; note = cEt 5-methylcytidine 3'-phosphorothioate
  modified_base 15: mod_base = OTHER; note = cEt guanosine 3'-phosphorothioate
  modified_base 16: mod_base = OTHER; note = cEt adenosine
aaagcaaatttcccga

SEQ ID NO: 912 - DNA, 16 bp, synthetic construct
  source 1..16: mol_type = other DNA
  modified_base 1..3: mod_base = OTHER; note = cEt adenosine 3'-phosphorothioate
  modified_base 4: mod_base = OTHER; note = 2'-deoxyadenosine 3'-phosphorothioate
  modified_base 5: mod_base = OTHER; note = 2'-deoxyguanosine 3'-phosphorothioate
  modified_base 6: mod_base = OTHER; note = 5-methyl-2'-deoxycytidine 3'-phosphorothioate
  modified_base 7..9: mod_base = OTHER; note = 2'-deoxyadenosine 3'-phosphorothioate
  modified_base 10..12: mod_base = OTHER; note = 2'-deoxythymidine 3'-phosphorothioate
  modified_base 13: mod_base = OTHER; note = 5-methyl-2'-deoxycytidine 3'-phosphorothioate
  modified_base 14..15: mod_base = OTHER; note = cEt 5-methylcytidine 3'-phosphorothioate
  modified_base 16: mod_base = OTHER; note = cEt guanosine
aaaagcaaatttcccg

SEQ ID NO: 913 - DNA, 16 bp, synthetic construct
  source 1..16: mol_type = other DNA
  modified_base 1: mod_base = OTHER; note = cEt guanosine 3'-phosphorothioate
  modified_base 2: mod_base = OTHER; note = cEt 5-methylcytidine 3'-phosphorothioate
  modified_base 3: mod_base = OTHER; note = cEt adenosine 3'-phosphorothioate
  modified_base 4..6: mod_base = OTHER; note = 2'-deoxyadenosine 3'-phosphorothioate
  modified_base 7: mod_base = OTHER; note = 2'-deoxyguanosine 3'-phosphorothioate
  modified_base 8: mod_base = OTHER; note = 5-methyl-2'-deoxycytidine 3'-phosphorothioate
  modified_base 9..11: mod_base = OTHER; note = 2'-deoxyadenosine 3'-phosphorothioate
  modified_base 12..13: mod_base = OTHER; note = 2'-deoxythymidine 3'-phosphorothioate
  modified_base 14: mod_base = OTHER; note = cEt thymidine 3'-phosphorothioate
  modified_base 15: mod_base = OTHER; note = cEt 5-methylcytidine 3'-phosphorothioate
  modified_base 16: mod_base = OTHER; note = cEt 5-methylcytidine
gcaaaagcaaatttcc

SEQ ID NO: 914 - DNA, 16 bp, synthetic construct
  source 1..16: mol_type = other DNA
  modified_base 1..2: mod_base = OTHER; note = cEt guanosine 3'-phosphorothioate
  modified_base 3: mod_base = OTHER; note = cEt 5-methylcytidine 3'-phosphorothioate
  modified_base 4..7: mod_base = OTHER; note = 2'-deoxyadenosine 3'-phosphorothioate
  modified_base 8: mod_base = OTHER; note = 2'-deoxyguanosine 3'-phosphorothioate
  modified_base 9: mod_base = OTHER; note = 5-methyl-2'-deoxycytidine 3'-phosphorothioate
  modified_base 10..12: mod_base = OTHER; note = 2'-deoxyadenosine 3'-phosphorothioate
  modified_base 13: mod_base = OTHER; note = 2'-deoxythymidine 3'-phosphorothioate
  modified_base 14..15: mod_base = OTHER; note = cEt thymidine 3'-phosphorothioate
  modified_base 16: mod_base = OTHER; note = cEt 5-methylcytidine
ggcaaaagcaaatttc

SEQ ID NO: 915 - DNA, 16 bp, synthetic construct
  source 1..16: mol_type = other DNA
  modified_base 1..2: mod_base = OTHER; note = cEt thymidine 3'-phosphorothioate
  modified_base 3: mod_base = OTHER; note = cEt guanosine 3'-phosphorothioate
  modified_base 4: mod_base = OTHER; note = 2'-deoxyguanosine 3'-phosphorothioate
  modified_base 5: mod_base = OTHER; note = 5-methyl-2'-deoxycytidine 3'-phosphorothioate
  modified_base 6..9: mod_base = OTHER; note = 2'-deoxyadenosine 3'-phosphorothioate
  modified_base 10: mod_base = OTHER; note = 2'-deoxyguanosine 3'-phosphorothioate
  modified_base 11: mod_base = OTHER; note = 5-methyl-2'-deoxycytidine 3'-phosphorothioate
  modified_base 12..13: mod_base = OTHER; note = 2'-deoxyadenosine 3'-phosphorothioate
  modified_base 14: mod_base = OTHER; note = cEt adenosine 3'-phosphorothioate
  modified_base 15: mod_base = OTHER; note = cEt thymidine 3'-phosphorothioate
  modified_base 16: mod_base = OTHER; note = cEt thymidine
ttggcaaaagcaaatt

SEQ ID NO: 916 - DNA, 16 bp, synthetic construct
  source 1..16: mol_type = other DNA
  modified_base 1: mod_base = OTHER; note = cEt guanosine 3'-phosphorothioate
  modified_base 2..3: mod_base = OTHER; note = cEt thymidine 3'-phosphorothioate
  modified_base 4: mod_base = OTHER; note = 2'-deoxythymidine 3'-phosphorothioate
  modified_base 5..6: mod_base = OTHER; note = 2'-deoxyguanosine 3'-phosphorothioate
  modified_base 7: mod_base = OTHER; note = 5-methyl-2'-deoxycytidine 3'-phosphorothioate
  modified_base 8..11: mod_base = OTHER; note = 2'-deoxyadenosine 3'-phosphorothioate
  modified_base 12: mod_base = OTHER; note = 2'-deoxyguanosine 3'-phosphorothioate
  modified_base 13: mod_base = OTHER; note = 5-methyl-2'-deoxycytidine 3'-phosphorothioate
  modified_base 14..15: mod_base = OTHER; note = cEt adenosine 3'-phosphorothioate
  modified_base 16: mod_base = OTHER; note = cEt adenosine
gtttggcaaaagcaaa

SEQ ID NO: 917 - DNA, 16 bp, synthetic construct
  source 1..16: mol_type = other DNA
  modified_base 1..2: mod_base = OTHER; note = cEt guanosine 3'-phosphorothioate
  modified_base 3: mod_base = OTHER; note = cEt thymidine 3'-phosphorothioate
  modified_base 4..5: mod_base = OTHER; note = 2'-deoxythymidine 3'-phosphorothioate
  modified_base 6..7: mod_base = OTHER; note = 2'-deoxyguanosine 3'-phosphorothioate
  modified_base 8: mod_base = OTHER; note = 5-methyl-2'-deoxycytidine 3'-phosphorothioate
  modified_base 9..12: mod_base = OTHER; note = 2'-deoxyadenosine 3'-phosphorothioate
  modified_base 13: mod_base = OTHER; note = 2'-deoxyguanosine 3'-phosphorothioate
  modified_base 14: mod_base = OTHER; note = cEt 5-methylcytidine 3'-phosphorothioate
  modified_base 15: mod_base = OTHER; note = cEt adenosine 3'-phosphorothioate
  modified_base 16: mod_base = OTHER; note = cEt adenosine
ggtttggcaaaagcaa

SEQ ID NO: 918 - DNA, 16 bp, synthetic construct
  source 1..16: mol_type = other DNA
  modified_base 1..3: mod_base = OTHER; note = cEt guanosine 3'-phosphorothioate
  modified_base 4..6: mod_base = OTHER; note = 2'-deoxythymidine 3'-phosphorothioate
  modified_base 7..8: mod_base = OTHER; note = 2'-deoxyguanosine 3'-phosphorothioate
  modified_base 9: mod_base = OTHER; note = 5-methyl-2'-deoxycytidine 3'-phosphorothioate
  modified_base 10..13: mod_base = OTHER; note = 2'-deoxyadenosine 3'-phosphorothioate
  modified_base 14: mod_base = OTHER; note = cEt guanosine 3'-phosphorothioate
  modified_base 15: mod_base = OTHER; note = cEt 5-methylcytidine 3'-phosphorothioate
  modified_base 16: mod_base = OTHER; note = cEt adenosine
gggtttggcaaaagca

SEQ ID NO: 919 - DNA, 16 bp, synthetic construct
  source 1..16: mol_type = other DNA
  modified_base 1: mod_base = OTHER; note = cEt guanosine 3'-phosphorothioate
  modified_base 2: mod_base = OTHER; note = cEt 5-methylcytidine 3'-phosphorothioate
  modified_base 3: mod_base = OTHER; note = cEt guanosine 3'-phosphorothioate
  modified_base 4..5: mod_base = OTHER; note = 2'-deoxyguanosine 3'-phosphorothioate
  modified_base 6..8: mod_base = OTHER; note = 2'-deoxythymidine 3'-phosphorothioate
  modified_base 9..10: mod_base = OTHER; note = 2'-deoxyguanosine 3'-phosphorothioate
  modified_base 11: mod_base = OTHER; note = 5-methyl-2'-deoxycytidine 3'-phosphorothioate
  modified_base 12..13: mod_base = OTHER; note = 2'-deoxyadenosine 3'-phosphorothioate
  modified_base 14..15: mod_base = OTHER; note = cEt adenosine 3'-phosphorothioate
  modified_base 16: mod_base = OTHER; note = cEt guanosine
gcgggtttggcaaaag

SEQ ID NO: 920 - DNA, 16 bp, synthetic construct
  source 1..16: mol_type = other DNA
  modified_base 1: mod_base = OTHER; note = cEt adenosine 3'-phosphorothioate
  modified_base 2: mod_base = OTHER; note = cEt guanosine 3'-phosphorothioate
  modified_base 3: mod_base = OTHER; note = cEt 5-methylcytidine 3'-phosphorothioate
  modified_base 4..6: mod_base = OTHER; note = 2'-deoxyguanosine 3'-phosphorothioate
  modified_base 7..9: mod_base = OTHER; note = 2'-deoxythymidine 3'-phosphorothioate
  modified_base 10..11: mod_base = OTHER; note = 2'-deoxyguanosine 3'-phosphorothioate
  modified_base 12: mod_base = OTHER; note = 5-methyl-2'-deoxycytidine 3'-phosphorothioate
  modified_base 13: mod_base = OTHER; note = 2'-deoxyadenosine 3'-phosphorothioate
  modified_base 14..15: mod_base = OTHER; note = cEt adenosine 3'-phosphorothioate
  modified_base 16: mod_base = OTHER; note = cEt adenosine
agcgggtttggcaaaa

SEQ ID NO: 921 - DNA, 16 bp, synthetic construct
  source 1..16: mol_type = other DNA
  modified_base 1..2: mod_base = OTHER; note = cEt adenosine 3'-phosphorothioate
  modified_base 3: mod_base = OTHER; note = cEt guanosine 3'-phosphorothioate
  modified_base 4: mod_base = OTHER; note = 5-methyl-2'-deoxycytidine 3'-phosphorothioate
  modified_base 5..7: mod_base = OTHER; note = 2'-deoxyguanosine 3'-phosphorothioate
  modified_base 8..10: mod_base = OTHER; note = 2'-deoxythymidine 3'-phosphorothioate
  modified_base 11..12: mod_base = OTHER; note = 2'-deoxyguanosine 3'-phosphorothioate
  modified_base 13: mod_base = OTHER; note = 5-methyl-2'-deoxycytidine 3'-phosphorothioate
  modified_base 14..15: mod_base = OTHER; note = cEt adenosine 3'-phosphorothioate
  modified_base 16: mod_base = OTHER; note = cEt adenosine
aagcgggtttggcaaa

SEQ ID NO: 922 - DNA, 16 bp, synthetic construct
  source 1..16: mol_type = other DNA
  modified_base 1: mod_base = OTHER; note = cEt 5-methylcytidine 3'-phosphorothioate
  modified_base 3: mod_base = OTHER; note = cEt 5-methylcytidine 3'-phosphorothioate
  modified_base 2: mod_base = OTHER; note = cEt thymidine 3'-phosphorothioate
  modified_base 4: mod_base = OTHER; note = 5-methyl-2'-deoxycytidine 3'-phosphorothioate
  modified_base 5: mod_base = OTHER; note = 2'-deoxyguanosine 3'-phosphorothioate
  modified_base 6: mod_base = OTHER; note = 2'-deoxyadenosine 3'-phosphorothioate
  modified_base 7: mod_base = OTHER; note = 2'-deoxyguanosine 3'-phosphorothioate
  modified_base 8: mod_base = OTHER; note = 2'-deoxyadenosine 3'-phosphorothioate
  modified_base 9: mod_base = OTHER; note = 2'-deoxyguanosine 3'-phosphorothioate
  modified_base 10: mod_base = OTHER; note = 5-methyl-2'-deoxycytidine 3'-phosphorothioate
  modified_base 11: mod_base = OTHER; note = 2'-deoxyadenosine 3'-phosphorothioate
  modified_base 12: mod_base = OTHER; note = 2'-deoxyguanosine 3'-phosphorothioate
  modified_base 13: mod_base = OTHER; note = 5-methyl-2'-deoxycytidine 3'-phosphorothioate
  modified_base 14: mod_base = OTHER; note = cEt guanosine 3'-phosphorothioate
  modified_base 15: mod_base = OTHER; note = cEt 5-methylcytidine 3'-phosphorothioate
  modified_base 16: mod_base = OTHER; note = cEt adenosine
ctccgagagcagcgca

SEQ ID NO: 923 - DNA, 16 bp, synthetic construct
  source 1..16: mol_type = other DNA
  modified_base 1: mod_base = OTHER; note = cEt guanosine 3'-phosphorothioate
  modified_base 2: mod_base = OTHER; note = cEt 5-methylcytidine 3'-phosphorothioate
  modified_base 3: mod_base = OTHER; note = cEt thymidine 3'-phosphorothioate
  modified_base 4..5: mod_base = OTHER; note = 5-methyl-2'-deoxycytidine 3'-phosphorothioate
  modified_base 6: mod_base = OTHER; note = 2'-deoxyguanosine 3'-phosphorothioate
  modified_base 7: mod_base = OTHER; note = 2'-deoxyadenosine 3'-phosphorothioate
  modified_base 8: mod_base = OTHER; note = 2'-deoxyguanosine 3'-phosphorothioate
  modified_base 9: mod_base = OTHER; note = 2'-deoxyadenosine 3'-phosphorothioate
  modified_base 10: mod_base = OTHER; note = 2'-deoxyguanosine 3'-phosphorothioate
  modified_base 11: mod_base = OTHER; note = 5-methyl-2'-deoxycytidine 3'-phosphorothioate
  modified_base 12: mod_base = OTHER; note = 2'-deoxyadenosine 3'-phosphorothioate
  modified_base 13: mod_base = OTHER; note = 2'-deoxyguanosine 3'-phosphorothioate
  modified_base 14: mod_base = OTHER; note = cEt 5-methylcytidine 3'-phosphorothioate
  modified_base 15: mod_base = OTHER; note = cEt guanosine 3'-phosphorothioate
  modified_base 16: mod_base = OTHER; note = cEt 5-methylcytidine
gctccgagagcagcgc

SEQ ID NO: 924 - DNA, 16 bp, synthetic construct
  source 1..16: mol_type = other DNA
  modified_base 1..2: mod_base = OTHER; note = cEt guanosine 3'-phosphorothioate
  modified_base 3: mod_base = OTHER; note = cEt 5-methylcytidine 3'-phosphorothioate
  modified_base 4: mod_base = OTHER; note = 2'-deoxythymidine 3'-phosphorothioate
  modified_base 5..6: mod_base = OTHER; note = 5-methyl-2'-deoxycytidine 3'-phosphorothioate
  modified_base 7: mod_base = OTHER; note = 2'-deoxyguanosine 3'-phosphorothioate
  modified_base 8: mod_base = OTHER; note = 2'-deoxyadenosine 3'-phosphorothioate
  modified_base 9: mod_base = OTHER; note = 2'-deoxyguanosine 3'-phosphorothioate
  modified_base 10: mod_base = OTHER; note = 2'-deoxyadenosine 3'-phosphorothioate
  modified_base 11: mod_base = OTHER; note = 2'-deoxyguanosine 3'-phosphorothioate
  modified_base 12: mod_base = OTHER; note = 5-methyl-2'-deoxycytidine 3'-phosphorothioate
  modified_base 13: mod_base = OTHER; note = 2'-deoxyadenosine 3'-phosphorothioate
  modified_base 14: mod_base = OTHER; note = cEt guanosine 3'-phosphorothioate
  modified_base 15: mod_base = OTHER; note = cEt 5-methylcytidine 3'-phosphorothioate
  modified_base 16: mod_base = OTHER; note = cEt guanosine
ggctccgagagcagcg

SEQ ID NO: 925 - DNA, 16 bp, synthetic construct
  source 1..16: mol_type = other DNA
  modified_base 1: mod_base = OTHER; note = cEt thymidine 3'-phosphorothioate
  modified_base 2..3: mod_base = OTHER; note = cEt adenosine 3'-phosphorothioate
  modified_base 4: mod_base = OTHER; note = 2'-deoxyadenosine 3'-phosphorothioate
  modified_base 5: mod_base = OTHER; note = 2'-deoxythymidine 3'-phosphorothioate
  modified_base 6: mod_base = OTHER; note = 2'-deoxyadenosine 3'-phosphorothioate
  modified_base 7: mod_base = OTHER; note = 2'-deoxythymidine 3'-phosphorothioate
  modified_base 8..9: mod_base = OTHER; note = 5-methyl-2'-deoxycytidine 3'-phosphorothioate
  modified_base 10..12: mod_base = OTHER; note = 2'-deoxyadenosine 3'-phosphorothioate
  modified_base 13: mod_base = OTHER; note = 5-methyl-2'-deoxycytidine 3'-phosphorothioate
  modified_base 14: mod_base = OTHER; note = cEt 5-methylcytidine 3'-phosphorothioate
  modified_base 15: mod_base = OTHER; note = cEt guanosine 3'-phosphorothioate
  modified_base 16: mod_base = OTHER; note = cEt 5-methylcytidine
taaatatccaaaccgc

SEQ ID NO: 926 - DNA, 16 bp, synthetic construct
  source 1..16: mol_type = other DNA
  modified_base 1: mod_base = OTHER; note = cEt guanosine 3'-phosphorothioate
  modified_base 2: mod_base = OTHER; note = cEt thymidine 3'-phosphorothioate
  modified_base 3: mod_base = OTHER; note = cEt 5-methylcytidine 3'-phosphorothioate
  modified_base 4..5: mod_base = OTHER; note = 2'-deoxyadenosine 3'-phosphorothioate
  modified_base 6: mod_base = OTHER; note = 2'-deoxythymidine 3'-phosphorothioate
  modified_base 7..9: mod_base = OTHER; note = 2'-deoxyadenosine 3'-phosphorothioate
  modified_base 10: mod_base = OTHER; note = 2'-deoxythymidine 3'-phosphorothioate
  modified_base 11: mod_base = OTHER; note = 2'-deoxyadenosine 3'-phosphorothioate
  modified_base 12: mod_base = OTHER; note = 2'-deoxythymidine 3'-phosphorothioate
  modified_base 13: mod_base = OTHER; note = 5-methyl-2'-deoxycytidine 3'-phosphorothioate
  modified_base 14: mod_base = OTHER; note = cEt 5-methylcytidine 3'-phosphorothioate
  modified_base 15: mod_base = OTHER; note = cEt adenosine 3'-phosphorothioate
  modified_base 16: mod_base = OTHER; note = cEt adenosine
gtcaataaatatccaa

SEQ ID NO: 927 - DNA, 16 bp, synthetic construct
  source 1..16: mol_type = other DNA
  modified_base 1: mod_base = OTHER; note = cEt adenosine 3'-phosphorothioate
  modified_base 2..3: mod_base = OTHER; note = cEt guanosine 3'-phosphorothioate
  modified_base 4: mod_base = OTHER; note = 2'-deoxythymidine 3'-phosphorothioate
  modified_base 5: mod_base = OTHER; note = 5-methyl-2'-deoxycytidine 3'-phosphorothioate
  modified_base 6..7: mod_base = OTHER; note = 2'-deoxyadenosine 3'-phosphorothioate
  modified_base 8: mod_base = OTHER; note = 2'-deoxythymidine 3'-phosphorothioate
  modified_base 9..11: mod_base = OTHER; note = 2'-deoxyadenosine 3'-phosphorothioate
  modified_base 12: mod_base = OTHER; note = 2'-deoxythymidine 3'-phosphorothioate
  modified_base 13: mod_base = OTHER; note = 2'-deoxyadenosine 3'-phosphorothioate
  modified_base 14: mod_base = OTHER; note = cEt thymidine 3'-phosphorothioate
  modified_base 15: mod_base = OTHER; note = cEt 5-methylcytidine 3'-phosphorothioate
  modified_base 16: mod_base = OTHER; note = cEt 5-methylcytidine
aggtcaataaatatcc

SEQ ID NO: 928 - DNA, 16 bp, synthetic construct
  source 1..16: mol_type = other DNA
  modified_base 1: mod_base = OTHER; note = cEt 5-methylcytidine 3'-phosphorothioate
  modified_base 2: mod_base = OTHER; note = cEt guanosine 3'-phosphorothioate
  modified_base 3: mod_base = OTHER; note = cEt adenosine 3'-phosphorothioate
  modified_base 4..5: mod_base = OTHER; note = 2'-deoxyguanosine 3'-phosphorothioate
  modified_base 6: mod_base = OTHER; note = 2'-deoxythymidine 3'-phosphorothioate
  modified_base 7: mod_base = OTHER; note = 5-methyl-2'-deoxycytidine 3'-phosphorothioate
  modified_base 8..9: mod_base = OTHER; note = 2'-deoxyadenosine 3'-phosphorothioate
  modified_base 10: mod_base = OTHER; note = 2'-deoxythymidine 3'-phosphorothioate
  modified_base 11..13: mod_base = OTHER; note = 2'-deoxyadenosine 3'-phosphorothioate
  modified_base 14: mod_base = OTHER; note = cEt thymidine 3'-phosphorothioate
  modified_base 15: mod_base = OTHER; note = cEt adenosine 3'-phosphorothioate
  modified_base 16: mod_base = OTHER; note = cEt thymidine
cgaggtcaataaatat

SEQ ID NO: 929 - DNA, 16 bp, synthetic construct
  source 1..16: mol_type = other DNA
  modified_base 1: mod_base = OTHER; note = cEt adenosine 3'-phosphorothioate
  modified_base 2: mod_base = OTHER; note = cEt 5-methylcytidine 3'-phosphorothioate
  modified_base 3: mod_base = OTHER; note = cEt guanosine 3'-phosphorothioate
  modified_base 4: mod_base = OTHER; note = 2'-deoxyadenosine 3'-phosphorothioate
  modified_base 5..6: mod_base = OTHER; note = 2'-deoxyguanosine 3'-phosphorothioate
  modified_base 7: mod_base = OTHER; note = 2'-deoxythymidine 3'-phosphorothioate
  modified_base 8: mod_base = OTHER; note = 5-methyl-2'-deoxycytidine 3'-phosphorothioate
  modified_base 9..10: mod_base = OTHER; note = 2'-deoxyadenosine 3'-phosphorothioate
  modified_base 11: mod_base = OTHER; note = 2'-deoxythymidine 3'-phosphorothioate
  modified_base 12..13: mod_base = OTHER; note = 2'-deoxyadenosine 3'-phosphorothioate
  modified_base 14: mod_base = OTHER; note = cEt adenosine 3'-phosphorothioate
  modified_base 15: mod_base = OTHER; note = cEt thymidine 3'-phosphorothioate
  modified_base 16: mod_base = OTHER; note = cEt adenosine
acgaggtcaataaata

SEQ ID NO: 930 - DNA, 16 bp, synthetic construct
  source 1..16: mol_type = other DNA
  modified_base 1: mod_base = OTHER; note = cEt guanosine 3'-phosphorothioate
  modified_base 2: mod_base = OTHER; note = cEt adenosine 3'-phosphorothioate
  modified_base 3: mod_base = OTHER; note = cEt 5-methylcytidine 3'-phosphorothioate
  modified_base 4: mod_base = OTHER; note = 2'-deoxyguanosine 3'-phosphorothioate
  modified_base 5: mod_base = OTHER; note = 2'-deoxyadenosine 3'-phosphorothioate
  modified_base 6..7: mod_base = OTHER; note = 2'-deoxyguanosine 3'-phosphorothioate
  modified_base 8: mod_base = OTHER; note = 2'-deoxythymidine 3'-phosphorothioate
  modified_base 9: mod_base = OTHER; note = 5-methyl-2'-deoxycytidine 3'-phosphorothioate
  modified_base 10..11: mod_base = OTHER; note = 2'-deoxyadenosine 3'-phosphorothioate
  modified_base 12: mod_base = OTHER; note = 2'-deoxythymidine 3'-phosphorothioate
  modified_base 13: mod_base = OTHER; note = 2'-deoxyadenosine 3'-phosphorothioate
  modified_base 14..15: mod_base = OTHER; note = cEt adenosine 3'-phosphorothioate
  modified_base 16: mod_base = OTHER; note = cEt thymidine
gacgaggtcaataaat

SEQ ID NO: 931 - DNA, 16 bp, synthetic construct
  source 1..16: mol_type = other DNA
  modified_base 1..2: mod_base = OTHER; note = cEt guanosine 3'-phosphorothioate
  modified_base 3: mod_base = OTHER; note = cEt adenosine 3'-phosphorothioate
  modified_base 4: mod_base = OTHER; note = 5-methyl-2'-deoxycytidine 3'-phosphorothioate
  modified_base 5: mod_base = OTHER; note = 2'-deoxyguanosine 3'-phosphorothioate
  modified_base 6: mod_base = OTHER; note = 2'-deoxyadenosine 3'-phosphorothioate
  modified_base 7..8: mod_base = OTHER; note = 2'-deoxyguanosine 3'-phosphorothioate
  modified_base 9: mod_base = OTHER; note = 2'-deoxythymidine 3'-phosphorothioate
  modified_base 10: mod_base = OTHER; note = 5-methyl-2'-deoxycytidine 3'-phosphorothioate
  modified_base 11..12: mod_base = OTHER; note = 2'-deoxyadenosine 3'-phosphorothioate
  modified_base 13: mod_base = OTHER; note = 2'-deoxythymidine 3'-phosphorothioate
  modified_base 14..15: mod_base = OTHER; note = cEt adenosine 3'-phosphorothioate
  modified_base 16: mod_base = OTHER; note = cEt adenosine
ggacgaggtcaataaa

SEQ ID NO: 932 - DNA, 16 bp, synthetic construct
  source 1..16: mol_type = other DNA
  modified_base 1: mod_base = OTHER; note = cEt adenosine 3'-phosphorothioate
  modified_base 2..3: mod_base = OTHER; note = cEt guanosine 3'-phosphorothioate
  modified_base 4: mod_base = OTHER; note = 2'-deoxyadenosine 3'-phosphorothioate
  modified_base 5: mod_base = OTHER; note = 5-methyl-2'-deoxycytidine 3'-phosphorothioate
  modified_base 6: mod_base = OTHER; note = 2'-deoxyguanosine 3'-phosphorothioate
  modified_base 7: mod_base = OTHER; note = 2'-deoxyadenosine 3'-phosphorothioate
  modified_base 8..9: mod_base = OTHER; note = 2'-deoxyguanosine 3'-phosphorothioate
  modified_base 10: mod_base = OTHER; note = 2'-deoxythymidine 3'-phosphorothioate
  modified_base 11: mod_base = OTHER; note = 5-methyl-2'-deoxycytidine 3'-phosphorothioate
  modified_base 12..13: mod_base = OTHER; note = 2'-deoxyadenosine 3'-phosphorothioate
  modified_base 14: mod_base = OTHER; note = cEt thymidine 3'-phosphorothioate
  modified_base 15: mod_base = OTHER; note = cEt adenosine 3'-phosphorothioate
  modified_base 16: mod_base = OTHER; note = cEt adenosine
aggacgaggtcaataa

SEQ ID NO: 933 - DNA, 16 bp, synthetic construct
  source 1..16: mol_type = other DNA
  modified_base 1: mod_base = OTHER; note = cEt guanosine 3'-phosphorothioate
  modified_base 2: mod_base = OTHER; note = cEt adenosine 3'-phosphorothioate
  modified_base 3: mod_base = OTHER; note = cEt guanosine 3'-phosphorothioate
  modified_base 4: mod_base = OTHER; note = 2'-deoxyguanosine 3'-phosphorothioate
  modified_base 5: mod_base = OTHER; note = 2'-deoxyadenosine 3'-phosphorothioate
  modified_base 6: mod_base = OTHER; note = 5-methyl-2'-deoxycytidine 3'-phosphorothioate
  modified_base 7: mod_base = OTHER; note = 2'-deoxyguanosine 3'-phosphorothioate
  modified_base 8: mod_base = OTHER; note = 2'-deoxyadenosine 3'-phosphorothioate
  modified_base 9..10: mod_base = OTHER; note = 2'-deoxyguanosine 3'-phosphorothioate
  modified_base 11: mod_base = OTHER; note = 2'-deoxythymidine 3'-phosphorothioate
  modified_base 12: mod_base = OTHER; note = 5-methyl-2'-deoxycytidine 3'-phosphorothioate
  modified_base 13: mod_base = OTHER; note = 2'-deoxyadenosine 3'-phosphorothioate
  modified_base 14: mod_base = OTHER; note = cEt adenosine 3'-phosphorothioate
  modified_base 15: mod_base = OTHER; note = cEt thymidine 3'-phosphorothioate
  modified_base 16: mod_base = OTHER; note = cEt adenosine
gaggacgaggtcaata

SEQ ID NO: 934 - DNA, 16 bp, synthetic construct
  source 1..16: mol_type = other DNA
  modified_base 1..2: mod_base = OTHER; note = cEt guanosine 3'-phosphorothioate
  modified_base 3: mod_base = OTHER; note = cEt adenosine 3'-phosphorothioate
  modified_base 4..5: mod_base = OTHER; note = 2'-deoxyguanosine 3'-phosphorothioate
  modified_base 6: mod_base = OTHER; note = 2'-deoxyadenosine 3'-phosphorothioate
  modified_base 7: mod_base = OTHER; note = 5-methyl-2'-deoxycytidine 3'-phosphorothioate
  modified_base 8: mod_base = OTHER; note = 2'-deoxyguanosine 3'-phosphorothioate
  modified_base 9: mod_base = OTHER; note = 2'-deoxyadenosine 3'-phosphorothioate
  modified_base 10..11: mod_base = OTHER; note = 2'-deoxyguanosine 3'-phosphorothioate
  modified_base 12: mod_base = OTHER; note = 2'-deoxythymidine 3'-phosphorothioate
  modified_base 13: mod_base = OTHER; note = 5-methyl-2'-deoxycytidine 3'-phosphorothioate
  modified_base 14..15: mod_base = OTHER; note = cEt adenosine 3'-phosphorothioate
  modified_base 16: mod_base = OTHER; note = cEt thymidine
ggaggacgaggtcaat

SEQ ID NO: 935 - DNA, 16 bp, synthetic construct
  source 1..16: mol_type = other DNA
  modified_base 1: mod_base = OTHER; note = cEt 5-methylcytidine 3'-phosphorothioate
  modified_base 2..3: mod_base = OTHER; note = cEt guanosine 3'-phosphorothioate
  modified_base 4: mod_base = OTHER; note = 2'-deoxyadenosine 3'-phosphorothioate
  modified_base 5..6: mod_base = OTHER; note = 2'-deoxyguanosine 3'-phosphorothioate
  modified_base 7: mod_base = OTHER; note = 2'-deoxyadenosine 3'-phosphorothioate
  modified_base 8: mod_base = OTHER; note = 5-methyl-2'-deoxycytidine 3'-phosphorothioate
  modified_base 9: mod_base = OTHER; note = 2'-deoxyguanosine 3'-phosphorothioate
  modified_base 10: mod_base = OTHER; note = 2'-deoxyadenosine 3'-phosphorothioate
  modified_base 11..12: mod_base = OTHER; note = 2'-deoxyguanosine 3'-phosphorothioate
  modified_base 13: mod_base = OTHER; note = 2'-deoxythymidine 3'-phosphorothioate
  modified_base 14: mod_base = OTHER; note = cEt 5-methylcytidine 3'-phosphorothioate
  modified_base 15: mod_base = OTHER; note = cEt adenosine 3'-phosphorothioate
  modified_base 16: mod_base = OTHER; note = cEt adenosine
cggaggacgaggtcaa

SEQ ID NO: 936 - DNA, 16 bp, synthetic construct
  source 1..16: mol_type = other DNA
  modified_base 1: mod_base = OTHER; note = cEt thymidine 3'-phosphorothioate
  modified_base 2: mod_base = OTHER; note = cEt 5-methylcytidine 3'-phosphorothioate
  modified_base 3: mod_base = OTHER; note = cEt guanosine 3'-phosphorothioate
  modified_base 4: mod_base = OTHER; note = 2'-deoxyguanosine 3'-phosphorothioate
  modified_base 5: mod_base = OTHER; note = 2'-deoxyadenosine 3'-phosphorothioate
  modified_base 6..7: mod_base = OTHER; note = 2'-deoxyguanosine 3'-phosphorothioate
  modified_base 8: mod_base = OTHER; note = 2'-deoxyadenosine 3'-phosphorothioate
  modified_base 9: mod_base = OTHER; note = 5-methyl-2'-deoxycytidine 3'-phosphorothioate
  modified_base 10: mod_base = OTHER; note = 2'-deoxyguanosine 3'-phosphorothioate
  modified_base 11: mod_base = OTHER; note = 2'-deoxyadenosine 3'-phosphorothioate
  modified_base 12..13: mod_base = OTHER; note = 2'-deoxyguanosine 3'-phosphorothioate
  modified_base 14: mod_base = OTHER; note = cEt thymidine 3'-phosphorothioate
  modified_base 15: mod_base = OTHER; note = cEt 5-methylcytidine 3'-phosphorothioate
  modified_base 16: mod_base = OTHER; note = cEt adenosine
tcggaggacgaggtca

SEQ ID NO: 937 - DNA, 16 bp, synthetic construct
  source 1..16: mol_type = other DNA
  modified_base 1: mod_base = OTHER; note = cEt guanosine 3'-phosphorothioate
  modified_base 2: mod_base = OTHER; note = cEt thymidine 3'-phosphorothioate
  modified_base 3: mod_base = OTHER; note = cEt 5-methylcytidine 3'-phosphorothioate
  modified_base 4..5: mod_base = OTHER; note = 2'-deoxyguanosine 3'-phosphorothioate
  modified_base 6: mod_base = OTHER; note = 2'-deoxyadenosine 3'-phosphorothioate
  modified_base 7..8: mod_base = OTHER; note = 2'-deoxyguanosine 3'-phosphorothioate
  modified_base 9: mod_base = OTHER; note = 2'-deoxyadenosine 3'-phosphorothioate
  modified_base 10: mod_base = OTHER; note = 5-methyl-2'-deoxycytidine 3'-phosphorothioate
  modified_base 11: mod_base = OTHER; note = 2'-deoxyguanosine 3'-phosphorothioate
  modified_base 12: mod_base = OTHER; note = 2'-deoxyadenosine 3'-phosphorothioate
  modified_base 13: mod_base = OTHER; note = 2'-deoxyguanosine 3'-phosphorothioate
  modified_base 14: mod_base = OTHER; note = cEt guanosine 3'-phosphorothioate
  modified_base 15: mod_base = OTHER; note = cEt thymidine 3'-phosphorothioate
  modified_base 16: mod_base = OTHER; note = cEt 5-methylcytidine
gtcggaggacgaggtc

SEQ ID NO: 938 - DNA, 16 bp, synthetic construct
  source 1..16: mol_type = other DNA
  modified_base 1: mod_base = OTHER; note = cEt adenosine 3'-phosphorothioate
  modified_base 2: mod_base = OTHER; note = cEt guanosine 3'-phosphorothioate
  modified_base 3: mod_base = OTHER; note = cEt thymidine 3'-phosphorothioate
  modified_base 4: mod_base = OTHER; note = 5-methyl-2'-deoxycytidine 3'-phosphorothioate
  modified_base 5..6: mod_base = OTHER; note = 2'-deoxyguanosine 3'-phosphorothioate
  modified_base 7: mod_base = OTHER; note = 2'-deoxyadenosine 3'-phosphorothioate
  modified_base 8..9: mod_base = OTHER; note = 2'-deoxyguanosine 3'-phosphorothioate
  modified_base 10: mod_base = OTHER; note = 2'-deoxyadenosine 3'-phosphorothioate
  modified_base 11: mod_base = OTHER; note = 5-methyl-2'-deoxycytidine 3'-phosphorothioate
  modified_base 12: mod_base = OTHER; note = 2'-deoxyguanosine 3'-phosphorothioate
  modified_base 13: mod_base = OTHER; note = 2'-deoxyadenosine 3'-phosphorothioate
  modified_base 14..15: mod_base = OTHER; note = cEt guanosine 3'-phosphorothioate
  modified_base 16: mod_base = OTHER; note = cEt thymidine
agtcggaggacgaggt

SEQ ID NO: 939 - DNA, 16 bp, synthetic construct
  source 1..16: mol_type = other DNA
  modified_base 1: mod_base = OTHER; note = cEt guanosine 3'-phosphorothioate
  modified_base 3: mod_base = OTHER; note = cEt guanosine 3'-phosphorothioate
  modified_base 2: mod_base = OTHER; note = cEt adenosine 3'-phosphorothioate
  modified_base 4: mod_base = OTHER; note = 2'-deoxythymidine 3'-phosphorothioate
  modified_base 5: mod_base = OTHER; note = 5-methyl-2'-deoxycytidine 3'-phosphorothioate
  modified_base 6..7: mod_base = OTHER; note = 2'-deoxyguanosine 3'-phosphorothioate
  modified_base 8: mod_base = OTHER; note = 2'-deoxyadenosine 3'-phosphorothioate
  modified_base 9..10: mod_base = OTHER; note = 2'-deoxyguanosine 3'-phosphorothioate
  modified_base 11: mod_base = OTHER; note = 2'-deoxyadenosine 3'-phosphorothioate
  modified_base 12: mod_base = OTHER; note = 5-methyl-2'-deoxycytidine 3'-phosphorothioate
  modified_base 13: mod_base = OTHER; note = 2'-deoxyguanosine 3'-phosphorothioate
  modified_base 14: mod_base = OTHER; note = cEt adenosine 3'-phosphorothioate
  modified_base 15: mod_base = OTHER; note = cEt guanosine 3'-phosphorothioate
  modified_base 16: mod_base = OTHER; note = cEt guanosine
gagtcggaggacgagg

SEQ ID NO: 940 - DNA, 16 bp, synthetic construct
  source 1..16: mol_type = other DNA
  modified_base 1: mod_base = OTHER; note = cEt 5-methylcytidine 3'-phosphorothioate
  modified_base 2: mod_base = OTHER; note = cEt guanosine 3'-phosphorothioate
  modified_base 3: mod_base = OTHER; note = cEt adenosine 3'-phosphorothioate
  modified_base 4: mod_base = OTHER; note = 2'-deoxyguanosine 3'-phosphorothioate
  modified_base 5: mod_base = OTHER; note = 2'-deoxythymidine 3'-phosphorothioate
  modified_base 6: mod_base = OTHER; note = 5-methyl-2'-deoxycytidine 3'-phosphorothioate
  modified_base 7..8: mod_base = OTHER; note = 2'-deoxyguanosine 3'-phosphorothioate
  modified_base 9: mod_base = OTHER; note = 2'-deoxyadenosine 3'-phosphorothioate
  modified_base 10..11: mod_base = OTHER; note = 2'-deoxyguanosine 3'-phosphorothioate
  modified_base 12: mod_base = OTHER; note = 2'-deoxyadenosine 3'-phosphorothioate
  modified_base 13: mod_base = OTHER; note = 5-methyl-2'-deoxycytidine 3'-phosphorothioate
  modified_base 14: mod_base = OTHER; note = cEt guanosine 3'-phosphorothioate
  modified_base 15: mod_base = OTHER; note = cEt adenosine 3'-phosphorothioate
  modified_base 16: mod_base = OTHER; note = cEt guanosine
cgagtcggaggacgag

SEQ ID NO: 941 - DNA, 16 bp, synthetic construct
  source 1..16: mol_type = other DNA
  modified_base 1: mod_base = OTHER; note = cEt adenosine 3'-phosphorothioate
  modified_base 2: mod_base = OTHER; note = cEt guanosine 3'-phosphorothioate
  modified_base 3: mod_base = OTHER; note = cEt 5-methylcytidine 3'-phosphorothioate
  modified_base 4: mod_base = OTHER; note = 2'-deoxyguanosine 3'-phosphorothioate
  modified_base 5: mod_base = OTHER; note = 2'-deoxyadenosine 3'-phosphorothioate
  modified_base 6: mod_base = OTHER; note = 2'-deoxyguanosine 3'-phosphorothioate
  modified_base 7: mod_base = OTHER; note = 2'-deoxythymidine 3'-phosphorothioate
  modified_base 8: mod_base = OTHER; note = 5-methyl-2'-deoxycytidine 3'-phosphorothioate
  modified_base 9..10: mod_base = OTHER; note = 2'-deoxyguanosine 3'-phosphorothioate
  modified_base 11: mod_base = OTHER; note = 2'-deoxyadenosine 3'-phosphorothioate
  modified_base 12..13: mod_base = OTHER; note = 2'-deoxyguanosine 3'-phosphorothioate
  modified_base 14: mod_base = OTHER; note = cEt adenosine 3'-phosphorothioate
  modified_base 15: mod_base = OTHER; note = cEt 5-methylcytidine 3'-phosphorothioate
  modified_base 16: mod_base = OTHER; note = cEt guanosine
agcgagtcggaggacg

SEQ ID NO: 942 - DNA, 16 bp, synthetic construct
  source 1..16: mol_type = other DNA
  modified_base 1: mod_base = OTHER; note = cEt 5-methylcytidine 3'-phosphorothioate
  modified_base 2: mod_base = OTHER; note = cEt adenosine 3'-phosphorothioate
  modified_base 3: mod_base = OTHER; note = cEt guanosine 3'-phosphorothioate
  modified_base 4: mod_base = OTHER; note = 5-methyl-2'-deoxycytidine 3'-phosphorothioate
  modified_base 5: mod_base = OTHER; note = 2'-deoxyguanosine 3'-phosphorothioate
  modified_base 6: mod_base = OTHER; note = 2'-deoxyadenosine 3'-phosphorothioate
  modified_base 7: mod_base = OTHER; note = 2'-deoxyguanosine 3'-phosphorothioate
  modified_base 8: mod_base = OTHER; note = 2'-deoxythymidine 3'-phosphorothioate
  modified_base 9: mod_base = OTHER; note = 5-methyl-2'-deoxycytidine 3'-phosphorothioate
  modified_base 10..11: mod_base = OTHER; note = 2'-deoxyguanosine 3'-phosphorothioate
  modified_base 12: mod_base = OTHER; note = 2'-deoxyadenosine 3'-phosphorothioate
  modified_base 13: mod_base = OTHER; note = 2'-deoxyguanosine 3'-phosphorothioate
  modified_base 14: mod_base = OTHER; note = cEt guanosine 3'-phosphorothioate
  modified_base 15: mod_base = OTHER; note = cEt adenosine 3'-phosphorothioate
  modified_base 16: mod_base = OTHER; note = cEt 5-methylcytidine
cagcgagtcggaggac

SEQ ID NO: 943 - DNA, 16 bp, synthetic construct
  source 1..16: mol_type = other DNA
  modified_base 1: mod_base = OTHER; note = cEt thymidine 3'-phosphorothioate
  modified_base 2: mod_base = OTHER; note = cEt 5-methylcytidine 3'-phosphorothioate
  modified_base 3: mod_base = OTHER; note = cEt adenosine 3'-phosphorothioate
  modified_base 4: mod_base = OTHER; note = 2'-deoxyguanosine 3'-phosphorothioate
  modified_base 5: mod_base = OTHER; note = 5-methyl-2'-deoxycytidine 3'-phosphorothioate
  modified_base 6: mod_base = OTHER; note = 2'-deoxyguanosine 3'-phosphorothioate
  modified_base 7: mod_base = OTHER; note = 2'-deoxyadenosine 3'-phosphorothioate
  modified_base 8: mod_base = OTHER; note = 2'-deoxyguanosine 3'-phosphorothioate
  modified_base 9: mod_base = OTHER; note = 2'-deoxythymidine 3'-phosphorothioate
  modified_base 10: mod_base = OTHER; note = 5-methyl-2'-deoxycytidine 3'-phosphorothioate
  modified_base 11..12: mod_base = OTHER; note = 2'-deoxyguanosine 3'-phosphorothioate
  modified_base 13: mod_base = OTHER; note = 2'-deoxyadenosine 3'-phosphorothioate
  modified_base 14..15: mod_base = OTHER; note = cEt guanosine 3'-phosphorothioate
  modified_base 16: mod_base = OTHER; note = cEt adenosine
tcagcgagtcggagga

SEQ ID NO: 944 - DNA, 16 bp, synthetic construct
  source 1..16: mol_type = other DNA
  modified_base 1: mod_base = OTHER; note = cEt guanosine 3'-phosphorothioate
  modified_base 2: mod_base = OTHER; note = cEt thymidine 3'-phosphorothioate
  modified_base 3: mod_base = OTHER; note = cEt 5-methylcytidine 3'-phosphorothioate
  modified_base 4: mod_base = OTHER; note = 2'-deoxyadenosine 3'-phosphorothioate
  modified_base 5: mod_base = OTHER; note = 2'-deoxyguanosine 3'-phosphorothioate
  modified_base 6: mod_base = OTHER; note = 5-methyl-2'-deoxycytidine 3'-phosphorothioate
  modified_base 7: mod_base = OTHER; note = 2'-deoxyguanosine 3'-phosphorothioate
  modified_base 8: mod_base = OTHER; note = 2'-deoxyadenosine 3'-phosphorothioate
  modified_base 9: mod_base = OTHER; note = 2'-deoxyguanosine 3'-phosphorothioate
  modified_base 10: mod_base = OTHER; note = 2'-deoxythymidine 3'-phosphorothioate
  modified_base 11: mod_base = OTHER; note = 5-methyl-2'-deoxycytidine 3'-phosphorothioate
  modified_base 12..13: mod_base = OTHER; note = 2'-deoxyguanosine 3'-phosphorothioate
  modified_base 14: mod_base = OTHER; note = cEt adenosine 3'-phosphorothioate
  modified_base 15: mod_base = OTHER; note = cEt guanosine 3'-phosphorothioate
  modified_base 16: mod_base = OTHER; note = cEt guanosine
gtcagcgagtcggagg

SEQ ID NO: 945 - DNA, 16 bp, synthetic construct
  source 1..16: mol_type = other DNA
  modified_base 1: mod_base = OTHER; note = cEt thymidine 3'-phosphorothioate
  modified_base 3: mod_base = OTHER; note = cEt thymidine 3'-phosphorothioate
  modified_base 2: mod_base = OTHER; note = cEt guanosine 3'-phosphorothioate
  modified_base 4: mod_base = OTHER; note = 5-methyl-2'-deoxycytidine 3'-phosphorothioate
  modified_base 5: mod_base = OTHER; note = 2'-deoxyadenosine 3'-phosphorothioate
  modified_base 6: mod_base = OTHER; note = 2'-deoxyguanosine 3'-phosphorothioate
  modified_base 7: mod_base = OTHER; note = 5-methyl-2'-deoxycytidine 3'-phosphorothioate
  modified_base 8: mod_base = OTHER; note = 2'-deoxyguanosine 3'-phosphorothioate
  modified_base 9: mod_base = OTHER; note = 2'-deoxyadenosine 3'-phosphorothioate
  modified_base 10: mod_base = OTHER; note = 2'-deoxyguanosine 3'-phosphorothioate
  modified_base 11: mod_base = OTHER; note = 2'-deoxythymidine 3'-phosphorothioate
  modified_base 12: mod_base = OTHER; note = 5-methyl-2'-deoxycytidine 3'-phosphorothioate
  modified_base 13: mod_base = OTHER; note = 2'-deoxyguanosine 3'-phosphorothioate
  modified_base 14: mod_base = OTHER; note = cEt guanosine 3'-phosphorothioate
  modified_base 15: mod_base = OTHER; note = cEt adenosine 3'-phosphorothioate
  modified_base 16: mod_base = OTHER; note = cEt guanosine
tgtcagcgagtcggag

SEQ ID NO: 946 - DNA, 16 bp, synthetic construct
  source 1..16: mol_type = other DNA
  modified_base 1: mod_base = OTHER; note = cEt 5-methylcytidine 3'-phosphorothioate
  modified_base 2: mod_base = OTHER; note = cEt thymidine 3'-phosphorothioate
  modified_base 3: mod_base = OTHER; note = cEt guanosine 3'-phosphorothioate
  modified_base 4: mod_base = OTHER; note = 2'-deoxythymidine 3'-phosphorothioate
  modified_base 5: mod_base = OTHER; note = 5-methyl-2'-deoxycytidine 3'-phosphorothioate
  modified_base 6: mod_base = OTHER; note = 2'-deoxyadenosine 3'-phosphorothioate
  modified_base 7: mod_base = OTHER; note = 2'-deoxyguanosine 3'-phosphorothioate
  modified_base 8: mod_base = OTHER; note = 5-methyl-2'-deoxycytidine 3'-phosphorothioate
  modified_base 9: mod_base = OTHER; note = 2'-deoxyguanosine 3'-phosphorothioate
  modified_base 10: mod_base = OTHER; note = 2'-deoxyadenosine 3'-phosphorothioate
  modified_base 11: mod_base = OTHER; note = 2'-deoxyguanosine 3'-phosphorothioate
  modified_base 12: mod_base = OTHER; note = 2'-deoxythymidine 3'-phosphorothioate
  modified_base 13: mod_base = OTHER; note = 5-methyl-2'-deoxycytidine 3'-phosphorothioate
  modified_base 14..15: mod_base = OTHER; note = cEt guanosine 3'-phosphorothioate
  modified_base 16: mod_base = OTHER; note = cEt adenosine
ctgtcagcgagtcgga

SEQ ID NO: 947 - DNA, 16 bp, synthetic construct
  source 1..16: mol_type = other DNA
  modified_base 1..2: mod_base = OTHER; note = cEt 5-methylcytidine 3'-phosphorothioate
  modified_base 3: mod_base = OTHER; note = cEt thymidine 3'-phosphorothioate
  modified_base 4: mod_base = OTHER; note = 2'-deoxyguanosine 3'-phosphorothioate
  modified_base 5: mod_base = OTHER; note = 2'-deoxythymidine 3'-phosphorothioate
  modified_base 6: mod_base = OTHER; note = 5-methyl-2'-deoxycytidine 3'-phosphorothioate
  modified_base 7: mod_base = OTHER; note = 2'-deoxyadenosine 3'-phosphorothioate
  modified_base 8: mod_base = OTHER; note = 2'-deoxyguanosine 3'-phosphorothioate
  modified_base 9: mod_base = OTHER; note = 5-methyl-2'-deoxycytidine 3'-phosphorothioate
  modified_base 10: mod_base = OTHER; note = 2'-deoxyguanosine 3'-phosphorothioate
  modified_base 11: mod_base = OTHER; note = 2'-deoxyadenosine 3'-phosphorothioate
  modified_base 12: mod_base = OTHER; note = 2'-deoxyguanosine 3'-phosphorothioate
  modified_base 13: mod_base = OTHER; note = 2'-deoxythymidine 3'-phosphorothioate
  modified_base 14: mod_base = OTHER; note = cEt 5-methylcytidine 3'-phosphorothioate
  modified_base 15: mod_base = OTHER; note = cEt guanosine 3'-phosphorothioate
  modified_base 16: mod_base = OTHER; note = cEt guanosine
cctgtcagcgagtcgg

SEQ ID NO: 948 - DNA, 16 bp, synthetic construct
  source 1..16: mol_type = other DNA
  modified_base 1: mod_base = OTHER; note = cEt guanosine 3'-phosphorothioate
  modified_base 2..3: mod_base = OTHER; note = cEt 5-methylcytidine 3'-phosphorothioate
  modified_base 4: mod_base = OTHER; note = 2'-deoxythymidine 3'-phosphorothioate
  modified_base 5: mod_base = OTHER; note = 2'-deoxyguanosine 3'-phosphorothioate
  modified_base 6: mod_base = OTHER; note = 2'-deoxythymidine 3'-phosphorothioate
  modified_base 7: mod_base = OTHER; note = 5-methyl-2'-deoxycytidine 3'-phosphorothioate
  modified_base 8: mod_base = OTHER; note = 2'-deoxyadenosine 3'-phosphorothioate
  modified_base 9: mod_base = OTHER; note = 2'-deoxyguanosine 3'-phosphorothioate
  modified_base 10: mod_base = OTHER; note = 5-methyl-2'-deoxycytidine 3'-phosphorothioate
  modified_base 11: mod_base = OTHER; note = 2'-deoxyguanosine 3'-phosphorothioate
  modified_base 12: mod_base = OTHER; note = 2'-deoxyadenosine 3'-phosphorothioate
  modified_base 13: mod_base = OTHER; note = 2'-deoxyguanosine 3'-phosphorothioate
  modified_base 14: mod_base = OTHER; note = cEt thymidine 3'-phosphorothioate
  modified_base 15: mod_base = OTHER; note = cEt 5-methylcytidine 3'-phosphorothioate
  modified_base 16: mod_base = OTHER; note = cEt guanosine
gcctgtcagcgagtcg

SEQ ID NO: 949 - DNA, 16 bp, synthetic construct
  source 1..16: mol_type = other DNA
  modified_base 1: mod_base = OTHER; note = cEt adenosine 3'-phosphorothioate
  modified_base 2: mod_base = OTHER; note = cEt guanosine 3'-phosphorothioate
  modified_base 3: mod_base = OTHER; note = cEt 5-methylcytidine 3'-phosphorothioate
  modified_base 4: mod_base = OTHER; note = 5-methyl-2'-deoxycytidine 3'-phosphorothioate
  modified_base 5: mod_base = OTHER; note = 2'-deoxythymidine 3'-phosphorothioate
  modified_base 6: mod_base = OTHER; note = 2'-deoxyguanosine 3'-phosphorothioate
  modified_base 7: mod_base = OTHER; note = 2'-deoxythymidine 3'-phosphorothioate
  modified_base 8: mod_base = OTHER; note = 5-methyl-2'-deoxycytidine 3'-phosphorothioate
  modified_base 9: mod_base = OTHER; note = 2'-deoxyadenosine 3'-phosphorothioate
  modified_base 10: mod_base = OTHER; note = 2'-deoxyguanosine 3'-phosphorothioate
  modified_base 11: mod_base = OTHER; note = 5-methyl-2'-deoxycytidine 3'-phosphorothioate
  modified_base 12: mod_base = OTHER; note = 2'-deoxyguanosine 3'-phosphorothioate
  modified_base 13: mod_base = OTHER; note = 2'-deoxyadenosine 3'-phosphorothioate
  modified_base 14: mod_base = OTHER; note = cEt guanosine 3'-phosphorothioate
  modified_base 15: mod_base = OTHER; note = cEt thymidine 3'-phosphorothioate
  modified_base 16: mod_base = OTHER; note = cEt 5-methylcytidine
agcctgtcagcgagtc

SEQ ID NO: 950 - DNA, 16 bp, synthetic construct
  source 1..16: mol_type = other DNA
  modified_base 1: mod_base = OTHER; note = cEt 5-methylcytidine 3'-phosphorothioate
  modified_base 2: mod_base = OTHER; note = cEt adenosine 3'-phosphorothioate
  modified_base 3: mod_base = OTHER; note = cEt guanosine 3'-phosphorothioate
  modified_base 4: mod_base = OTHER; note = 2'-deoxythymidine 3'-phosphorothioate
  modified_base 5: mod_base = OTHER; note = 2'-deoxyguanosine 3'-phosphorothioate
  modified_base 6: mod_base = OTHER; note = 5-methyl-2'-deoxycytidine 3'-phosphorothioate
  modified_base 7: mod_base = OTHER; note = 2'-deoxyadenosine 3'-phosphorothioate
  modified_base 8: mod_base = OTHER; note = 2'-deoxythymidine 3'-phosphorothioate
  modified_base 9..10: mod_base = OTHER; note = 5-methyl-2'-deoxycytidine 3'-phosphorothioate
  modified_base 11..13: mod_base = OTHER; note = 2'-deoxyadenosine 3'-phosphorothioate
  modified_base 14: mod_base = OTHER; note = cEt adenosine 3'-phosphorothioate
  modified_base 15: mod_base = OTHER; note = cEt 5-methylcytidine 3'-phosphorothioate
  modified_base 16: mod_base = OTHER; note = cEt guanosine
cagtgcatccaaaacg

SEQ ID NO: 951 - DNA, 16 bp, synthetic construct
  source 1..16: mol_type = other DNA
  modified_base 1: mod_base = OTHER; note = cEt thymidine 3'-phosphorothioate
  modified_base 2: mod_base = OTHER; note = cEt 5-methylcytidine 3'-phosphorothioate
  modified_base 3: mod_base = OTHER; note = cEt adenosine 3'-phosphorothioate
  modified_base 4: mod_base = OTHER; note = 2'-deoxyguanosine 3'-phosphorothioate
  modified_base 5: mod_base = OTHER; note = 2'-deoxythymidine 3'-phosphorothioate
  modified_base 6: mod_base = OTHER; note = 2'-deoxyguanosine 3'-phosphorothioate
  modified_base 7: mod_base = OTHER; note = 5-methyl-2'-deoxycytidine 3'-phosphorothioate
  modified_base 8: mod_base = OTHER; note = 2'-deoxyadenosine 3'-phosphorothioate
  modified_base 9: mod_base = OTHER; note = 2'-deoxythymidine 3'-phosphorothioate
  modified_base 10..11: mod_base = OTHER; note = 5-methyl-2'-deoxycytidine 3'-phosphorothioate
  modified_base 12..13: mod_base = OTHER; note = 2'-deoxyadenosine 3'-phosphorothioate
  modified_base 14..15: mod_base = OTHER; note = cEt adenosine 3'-phosphorothioate
  modified_base 16: mod_base = OTHER; note = cEt 5-methylcytidine
tcagtgcatccaaaac

SEQ ID NO: 952 - DNA, 16 bp, synthetic construct
  source 1..16: mol_type = other DNA
  modified_base 1: mod_base = OTHER; note = cEt 5-methylcytidine 3'-phosphorothioate
  modified_base 3: mod_base = OTHER; note = cEt 5-methylcytidine 3'-phosphorothioate
  modified_base 2: mod_base = OTHER; note = cEt thymidine 3'-phosphorothioate
  modified_base 4: mod_base = OTHER; note = 2'-deoxyadenosine 3'-phosphorothioate
  modified_base 5: mod_base = OTHER; note = 2'-deoxyguanosine 3'-phosphorothioate
  modified_base 6: mod_base = OTHER; note = 2'-deoxythymidine 3'-phosphorothioate
  modified_base 7: mod_base = OTHER; note = 2'-deoxyguanosine 3'-phosphorothioate
  modified_base 8: mod_base = OTHER; note = 5-methyl-2'-deoxycytidine 3'-phosphorothioate
  modified_base 9: mod_base = OTHER; note = 2'-deoxyadenosine 3'-phosphorothioate
  modified_base 10: mod_base = OTHER; note = 2'-deoxythymidine 3'-phosphorothioate
  modified_base 11..12: mod_base = OTHER; note = 5-methyl-2'-deoxycytidine 3'-phosphorothioate
  modified_base 13: mod_base = OTHER; note = 2'-deoxyadenosine 3'-phosphorothioate
  modified_base 14..15: mod_base = OTHER; note = cEt adenosine 3'-phosphorothioate
  modified_base 16: mod_base = OTHER; note = cEt adenosine
ctcagtgcatccaaaa

SEQ ID NO: 953 - DNA, 16 bp, synthetic construct
  source 1..16: mol_type = other DNA
  modified_base 1: mod_base = OTHER; note = cEt thymidine 3'-phosphorothioate
  modified_base 3: mod_base = OTHER; note = cEt thymidine 3'-phosphorothioate
  modified_base 2: mod_base = OTHER; note = cEt 5-methylcytidine 3'-phosphorothioate
  modified_base 4: mod_base = OTHER; note = 5-methyl-2'-deoxycytidine 3'-phosphorothioate
  modified_base 5: mod_base = OTHER; note = 2'-deoxyadenosine 3'-phosphorothioate
  modified_base 6: mod_base = OTHER; note = 2'-deoxyguanosine 3'-phosphorothioate
  modified_base 7: mod_base = OTHER; note = 2'-deoxythymidine 3'-phosphorothioate
  modified_base 8: mod_base = OTHER; note = 2'-deoxyguanosine 3'-phosphorothioate
  modified_base 9: mod_base = OTHER; note = 5-methyl-2'-deoxycytidine 3'-phosphorothioate
  modified_base 10: mod_base = OTHER; note = 2'-deoxyadenosine 3'-phosphorothioate
  modified_base 11: mod_base = OTHER; note = 2'-deoxythymidine 3'-phosphorothioate
  modified_base 12..13: mod_base = OTHER; note = 5-methyl-2'-deoxycytidine 3'-phosphorothioate
  modified_base 14..15: mod_base = OTHER; note = cEt adenosine 3'-phosphorothioate
  modified_base 16: mod_base = OTHER; note = cEt adenosine
tctcagtgcatccaaa

SEQ ID NO: 954 - DNA, 16 bp, synthetic construct
  source 1..16: mol_type = other DNA
  modified_base 1: mod_base = OTHER; note = cEt guanosine 3'-phosphorothioate
  modified_base 2: mod_base = OTHER; note = cEt thymidine 3'-phosphorothioate
  modified_base 3: mod_base = OTHER; note = cEt 5-methylcytidine 3'-phosphorothioate
  modified_base 4: mod_base = OTHER; note = 2'-deoxythymidine 3'-phosphorothioate
  modified_base 5: mod_base = OTHER; note = 5-methyl-2'-deoxycytidine 3'-phosphorothioate
  modified_base 6: mod_base = OTHER; note = 2'-deoxyadenosine 3'-phosphorothioate
  modified_base 7: mod_base = OTHER; note = 2'-deoxyguanosine 3'-phosphorothioate
  modified_base 8: mod_base = OTHER; note = 2'-deoxythymidine 3'-phosphorothioate
  modified_base 9: mod_base = OTHER; note = 2'-deoxyguanosine 3'-phosphorothioate
  modified_base 10: mod_base = OTHER; note = 5-methyl-2'-deoxycytidine 3'-phosphorothioate
  modified_base 11: mod_base = OTHER; note = 2'-deoxyadenosine 3'-phosphorothioate
  modified_base 12: mod_base = OTHER; note = 2'-deoxythymidine 3'-phosphorothioate
  modified_base 13: mod_base = OTHER; note = 5-methyl-2'-deoxycytidine 3'-phosphorothioate
  modified_base 14: mod_base = OTHER; note = cEt 5-methylcytidine 3'-phosphorothioate
  modified_base 15: mod_base = OTHER; note = cEt adenosine 3'-phosphorothioate
  modified_base 16: mod_base = OTHER; note = cEt adenosine
gtctcagtgcatccaa

SEQ ID NO: 955 - DNA, 16 bp, synthetic construct
  source 1..16: mol_type = other DNA
  modified_base 1..3: mod_base = OTHER; note = cEt guanosine 3'-phosphorothioate
  modified_base 4: mod_base = OTHER; note = 2'-deoxythymidine 3'-phosphorothioate
  modified_base 5: mod_base = OTHER; note = 5-methyl-2'-deoxycytidine 3'-phosphorothioate
  modified_base 6: mod_base = OTHER; note = 2'-deoxythymidine 3'-phosphorothioate
  modified_base 7: mod_base = OTHER; note = 5-methyl-2'-deoxycytidine 3'-phosphorothioate
  modified_base 8: mod_base = OTHER; note = 2'-deoxyadenosine 3'-phosphorothioate
  modified_base 9: mod_base = OTHER; note = 2'-deoxyguanosine 3'-phosphorothioate
  modified_base 10: mod_base = OTHER; note = 2'-deoxythymidine 3'-phosphorothioate
  modified_base 11: mod_base = OTHER; note = 2'-deoxyguanosine 3'-phosphorothioate
  modified_base 12: mod_base = OTHER; note = 5-methyl-2'-deoxycytidine 3'-phosphorothioate
  modified_base 13: mod_base = OTHER; note = 2'-deoxyadenosine 3'-phosphorothioate
  modified_base 14: mod_base = OTHER; note = cEt thymidine 3'-phosphorothioate
  modified_base 15: mod_base = OTHER; note = cEt 5-methylcytidine 3'-phosphorothioate
  modified_base 16: mod_base = OTHER; note = cEt 5-methylcytidine
gggtctcagtgcatcc

SEQ ID NO: 956 - DNA, 16 bp, synthetic construct
  source 1..16: mol_type = other DNA
  modified_base 1: mod_base = OTHER; note = cEt 5-methylcytidine 3'-phosphorothioate
  modified_base 2..3: mod_base = OTHER; note = cEt adenosine 3'-phosphorothioate
  modified_base 4: mod_base = OTHER; note = 2'-deoxythymidine 3'-phosphorothioate
  modified_base 5..7: mod_base = OTHER; note = 2'-deoxyadenosine 3'-phosphorothioate
  modified_base 8: mod_base = OTHER; note = 2'-deoxythymidine 3'-phosphorothioate
  modified_base 9: mod_base = OTHER; note = 2'-deoxyadenosine 3'-phosphorothioate
  modified_base 10..11: mod_base = OTHER; note = 5-methyl-2'-deoxycytidine 3'-phosphorothioate
  modified_base 12: mod_base = OTHER; note = 2'-deoxyguanosine 3'-phosphorothioate
  modified_base 13: mod_base = OTHER; note = 2'-deoxyadenosine 3'-phosphorothioate
  modified_base 14..15: mod_base = OTHER; note = cEt guanosine 3'-phosphorothioate
  modified_base 16: mod_base = OTHER; note = cEt adenosine
caataaataccgagga

SEQ ID NO: 957 - DNA, 16 bp, synthetic construct
  source 1..16: mol_type = other DNA
  modified_base 1: mod_base = OTHER; note = cEt adenosine 3'-phosphorothioate
  modified_base 3: mod_base = OTHER; note = cEt adenosine 3'-phosphorothioate
  modified_base 2: mod_base = OTHER; note = cEt guanosine 3'-phosphorothioate
  modified_base 4: mod_base = OTHER; note = 5-methyl-2'-deoxycytidine 3'-phosphorothioate
  modified_base 5..6: mod_base = OTHER; note = 2'-deoxyadenosine 3'-phosphorothioate
  modified_base 7: mod_base = OTHER; note = 2'-deoxythymidine 3'-phosphorothioate
  modified_base 8..10: mod_base = OTHER; note = 2'-deoxyadenosine 3'-phosphorothioate
  modified_base 11: mod_base = OTHER; note = 2'-deoxythymidine 3'-phosphorothioate
  modified_base 12: mod_base = OTHER; note = 2'-deoxyadenosine 3'-phosphorothioate
  modified_base 13: mod_base = OTHER; note = 5-methyl-2'-deoxycytidine 3'-phosphorothioate
  modified_base 14: mod_base = OTHER; note = cEt 5-methylcytidine 3'-phosphorothioate
  modified_base 15: mod_base = OTHER; note = cEt guanosine 3'-phosphorothioate
  modified_base 16: mod_base = OTHER; note = cEt adenosine
agacaataaataccga

SEQ ID NO: 958 - DNA, 16 bp, synthetic construct
  source 1..16: mol_type = other DNA
  modified_base 1: mod_base = OTHER; note = cEt 5-methylcytidine 3'-phosphorothioate
  modified_base 2: mod_base = OTHER; note = cEt adenosine 3'-phosphorothioate
  modified_base 3: mod_base = OTHER; note = cEt guanosine 3'-phosphorothioate
  modified_base 4: mod_base = OTHER; note = 2'-deoxyadenosine 3'-phosphorothioate
  modified_base 5: mod_base = OTHER; note = 5-methyl-2'-deoxycytidine 3'-phosphorothioate
  modified_base 6..7: mod_base = OTHER; note = 2'-deoxyadenosine 3'-phosphorothioate
  modified_base 8: mod_base = OTHER; note = 2'-deoxythymidine 3'-phosphorothioate
  modified_base 9..11: mod_base = OTHER; note = 2'-deoxyadenosine 3'-phosphorothioate
  modified_base 12: mod_base = OTHER; note = 2'-deoxythymidine 3'-phosphorothioate
  modified_base 13: mod_base = OTHER; note = 2'-deoxyadenosine 3'-phosphorothioate
  modified_base 14..15: mod_base = OTHER; note = cEt 5-methylcytidine 3'-phosphorothioate
  modified_base 16: mod_base = OTHER; note = cEt guanosine
cagacaataaataccg

SEQ ID NO: 959 - DNA, 16 bp, synthetic construct
  source 1..16: mol_type = other DNA
  modified_base 1: mod_base = OTHER; note = cEt 5-methylcytidine 3'-phosphorothioate
  modified_base 3: mod_base = OTHER; note = cEt 5-methylcytidine 3'-phosphorothioate
  modified_base 2: mod_base = OTHER; note = cEt adenosine 3'-phosphorothioate
  modified_base 4..5: mod_base = OTHER; note = 2'-deoxyguanosine 3'-phosphorothioate
  modified_base 6..7: mod_base = OTHER; note = 2'-deoxyadenosine 3'-phosphorothioate
  modified_base 8: mod_base = OTHER; note = 2'-deoxyguanosine 3'-phosphorothioate
  modified_base 9: mod_base = OTHER; note = 5-methyl-2'-deoxycytidine 3'-phosphorothioate
  modified_base 10: mod_base = OTHER; note = 2'-deoxyadenosine 3'-phosphorothioate
  modified_base 11: mod_base = OTHER; note = 5-methyl-2'-deoxycytidine 3'-phosphorothioate
  modified_base 12: mod_base = OTHER; note = 2'-deoxyguanosine 3'-phosphorothioate
  modified_base 13: mod_base = OTHER; note = 2'-deoxyadenosine 3'-phosphorothioate
  modified_base 14: mod_base = OTHER; note = cEt 5-methylcytidine 3'-phosphorothioate
  modified_base 15: mod_base = OTHER; note = cEt adenosine 3'-phosphorothioate
  modified_base 16: mod_base = OTHER; note = cEt 5-methylcytidine
cacggaagcacgacac

SEQ ID NO: 960 - DNA, 16 bp, synthetic construct
  source 1..16: mol_type = other DNA
  modified_base 1: mod_base = OTHER; note = cEt thymidine 3'-phosphorothioate
  modified_base 2: mod_base = OTHER; note = cEt 5-methylcytidine 3'-phosphorothioate
  modified_base 3: mod_base = OTHER; note = cEt adenosine 3'-phosphorothioate
  modified_base 4: mod_base = OTHER; note = 5-methyl-2'-deoxycytidine 3'-phosphorothioate
  modified_base 5..6: mod_base = OTHER; note = 2'-deoxyguanosine 3'-phosphorothioate
  modified_base 7..8: mod_base = OTHER; note = 2'-deoxyadenosine 3'-phosphorothioate
  modified_base 9: mod_base = OTHER; note = 2'-deoxyguanosine 3'-phosphorothioate
  modified_base 10: mod_base = OTHER; note = 5-methyl-2'-deoxycytidine 3'-phosphorothioate
  modified_base 11: mod_base = OTHER; note = 2'-deoxyadenosine 3'-phosphorothioate
  modified_base 12: mod_base = OTHER; note = 5-methyl-2'-deoxycytidine 3'-phosphorothioate
  modified_base 13: mod_base = OTHER; note = 2'-deoxyguanosine 3'-phosphorothioate
  modified_base 14: mod_base = OTHER; note = cEt adenosine 3'-phosphorothioate
  modified_base 15: mod_base = OTHER; note = cEt 5-methylcytidine 3'-phosphorothioate
  modified_base 16: mod_base = OTHER; note = cEt adenosine
tcacggaagcacgaca

SEQ ID NO: 961 - DNA, 16 bp, synthetic construct
  source 1..16: mol_type = other DNA
  modified_base 1: mod_base = OTHER; note = cEt 5-methylcytidine 3'-phosphorothioate
  modified_base 3: mod_base = OTHER; note = cEt 5-methylcytidine 3'-phosphorothioate
  modified_base 2: mod_base = OTHER; note = cEt thymidine 3'-phosphorothioate
  modified_base 4: mod_base = OTHER; note = 2'-deoxyadenosine 3'-phosphorothioate
  modified_base 5: mod_base = OTHER; note = 5-methyl-2'-deoxycytidine 3'-phosphorothioate
  modified_base 6..7: mod_base = OTHER; note = 2'-deoxyguanosine 3'-phosphorothioate
  modified_base 8..9: mod_base = OTHER; note = 2'-deoxyadenosine 3'-phosphorothioate
  modified_base 10: mod_base = OTHER; note = 2'-deoxyguanosine 3'-phosphorothioate
  modified_base 11: mod_base = OTHER; note = 5-methyl-2'-deoxycytidine 3'-phosphorothioate
  modified_base 12: mod_base = OTHER; note = 2'-deoxyadenosine 3'-phosphorothioate
  modified_base 13: mod_base = OTHER; note = 5-methyl-2'-deoxycytidine 3'-phosphorothioate
  modified_base 14: mod_base = OTHER; note = cEt guanosine 3'-phosphorothioate
  modified_base 15: mod_base = OTHER; note = cEt adenosine 3'-phosphorothioate
  modified_base 16: mod_base = OTHER; note = cEt 5-methylcytidine
ctcacggaagcacgac

SEQ ID NO: 962 - DNA, 16 bp, synthetic construct
  source 1..16: mol_type = other DNA
  modified_base 1..2: mod_base = OTHER; note = cEt 5-methylcytidine 3'-phosphorothioate
  modified_base 3: mod_base = OTHER; note = cEt thymidine 3'-phosphorothioate
  modified_base 4: mod_base = OTHER; note = 5-methyl-2'-deoxycytidine 3'-phosphorothioate
  modified_base 5: mod_base = OTHER; note = 2'-deoxythymidine 3'-phosphorothioate
  modified_base 6..7: mod_base = OTHER; note = 5-methyl-2'-deoxycytidine 3'-phosphorothioate
  modified_base 8: mod_base = OTHER; note = 2'-deoxythymidine 3'-phosphorothioate
  modified_base 9: mod_base = OTHER; note = 5-methyl-2'-deoxycytidine 3'-phosphorothioate
  modified_base 10: mod_base = OTHER; note = 2'-deoxyadenosine 3'-phosphorothioate
  modified_base 11: mod_base = OTHER; note = 5-methyl-2'-deoxycytidine 3'-phosphorothioate
  modified_base 12..13: mod_base = OTHER; note = 2'-deoxyguanosine 3'-phosphorothioate
  modified_base 14..15: mod_base = OTHER; note = cEt adenosine 3'-phosphorothioate
  modified_base 16: mod_base = OTHER; note = cEt guanosine
cctctcctcacggaag

SEQ ID NO: 963 - DNA, 16 bp, synthetic construct
  source 1..16: mol_type = other DNA
  modified_base 1: mod_base = OTHER; note = cEt guanosine 3'-phosphorothioate
  modified_base 2: mod_base = OTHER; note = cEt thymidine 3'-phosphorothioate
  modified_base 3: mod_base = OTHER; note = cEt 5-methylcytidine 3'-phosphorothioate
  modified_base 4..5: mod_base = OTHER; note = 5-methyl-2'-deoxycytidine 3'-phosphorothioate
  modified_base 6: mod_base = OTHER; note = 2'-deoxythymidine 3'-phosphorothioate
  modified_base 7: mod_base = OTHER; note = 5-methyl-2'-deoxycytidine 3'-phosphorothioate
  modified_base 8: mod_base = OTHER; note = 2'-deoxythymidine 3'-phosphorothioate
  modified_base 9..10: mod_base = OTHER; note = 5-methyl-2'-deoxycytidine 3'-phosphorothioate
  modified_base 11: mod_base = OTHER; note = 2'-deoxythymidine 3'-phosphorothioate
  modified_base 12: mod_base = OTHER; note = 5-methyl-2'-deoxycytidine 3'-phosphorothioate
  modified_base 13: mod_base = OTHER; note = 2'-deoxyadenosine 3'-phosphorothioate
  modified_base 14: mod_base = OTHER; note = cEt 5-methylcytidine 3'-phosphorothioate
  modified_base 15: mod_base = OTHER; note = cEt guanosine 3'-phosphorothioate
  modified_base 16: mod_base = OTHER; note = cEt guanosine
gtccctctcctcacgg

SEQ ID NO: 964 - DNA, 16 bp, synthetic construct
  source 1..16: mol_type = other DNA
  modified_base 1: mod_base = OTHER; note = cEt 5-methylcytidine 3'-phosphorothioate
  modified_base 2: mod_base = OTHER; note = cEt guanosine 3'-phosphorothioate
  modified_base 3: mod_base = OTHER; note = cEt thymidine 3'-phosphorothioate
  modified_base 4..6: mod_base = OTHER; note = 5-methyl-2'-deoxycytidine 3'-phosphorothioate
  modified_base 7: mod_base = OTHER; note = 2'-deoxythymidine 3'-phosphorothioate
  modified_base 8: mod_base = OTHER; note = 5-methyl-2'-deoxycytidine 3'-phosphorothioate
  modified_base 9: mod_base = OTHER; note = 2'-deoxythymidine 3'-phosphorothioate
  modified_base 10..11: mod_base = OTHER; note = 5-methyl-2'-deoxycytidine 3'-phosphorothioate
  modified_base 12: mod_base = OTHER; note = 2'-deoxythymidine 3'-phosphorothioate
  modified_base 13: mod_base = OTHER; note = 5-methyl-2'-deoxycytidine 3'-phosphorothioate
  modified_base 14: mod_base = OTHER; note = cEt adenosine 3'-phosphorothioate
  modified_base 15: mod_base = OTHER; note = cEt 5-methylcytidine 3'-phosphorothioate
  modified_base 16: mod_base = OTHER; note = cEt guanosine
cgtccctctcctcacg

SEQ ID NO: 965 - DNA, 16 bp, synthetic construct
  source 1..16: mol_type = other DNA
  modified_base 1..3: mod_base = OTHER; note = cEt 5-methylcytidine 3'-phosphorothioate
  modified_base 4: mod_base = OTHER; note = 2'-deoxyadenosine 3'-phosphorothioate
  modified_base 5..6: mod_base = OTHER; note = 2'-deoxythymidine 3'-phosphorothioate
  modified_base 7: mod_base = OTHER; note = 5-methyl-2'-deoxycytidine 3'-phosphorothioate
  modified_base 8: mod_base = OTHER; note = 2'-deoxyadenosine 3'-phosphorothioate
  modified_base 9..10: mod_base = OTHER; note = 5-methyl-2'-deoxycytidine 3'-phosphorothioate
  modified_base 11..12: mod_base = OTHER; note = 2'-deoxyadenosine 3'-phosphorothioate
  modified_base 13: mod_base = OTHER; note = 5-methyl-2'-deoxycytidine 3'-phosphorothioate
  modified_base 14: mod_base = OTHER; note = cEt adenosine 3'-phosphorothioate
  modified_base 15: mod_base = OTHER; note = cEt 5-methylcytidine 3'-phosphorothioate
  modified_base 16: mod_base = OTHER; note = cEt guanosine
cccattcaccaacacg

SEQ ID NO: 966 - DNA, 16 bp, synthetic construct
  source 1..16: mol_type = other DNA
  modified_base 1..3: mod_base = OTHER; note = cEt 5-methylcytidine 3'-phosphorothioate
  modified_base 4: mod_base = OTHER; note = 5-methyl-2'-deoxycytidine 3'-phosphorothioate
  modified_base 5: mod_base = OTHER; note = 2'-deoxyadenosine 3'-phosphorothioate
  modified_base 6..7: mod_base = OTHER; note = 2'-deoxythymidine 3'-phosphorothioate
  modified_base 8: mod_base = OTHER; note = 5-methyl-2'-deoxycytidine 3'-phosphorothioate
  modified_base 9: mod_base = OTHER; note = 2'-deoxyadenosine 3'-phosphorothioate
  modified_base 10..11: mod_base = OTHER; note = 5-methyl-2'-deoxycytidine 3'-phosphorothioate
  modified_base 12..13: mod_base = OTHER; note = 2'-deoxyadenosine 3'-phosphorothioate
  modified_base 14: mod_base = OTHER; note = cEt 5-methylcytidine 3'-phosphorothioate
  modified_base 15: mod_base = OTHER; note = cEt adenosine 3'-phosphorothioate
  modified_base 16: mod_base = OTHER; note = cEt 5-methylcytidine
ccccattcaccaacac

SEQ ID NO: 967 - DNA, 16 bp, synthetic construct
  source 1..16: mol_type = other DNA
  modified_base 1: mod_base = OTHER; note = cEt thymidine 3'-phosphorothioate
  modified_base 2..3: mod_base = OTHER; note = cEt 5-methylcytidine 3'-phosphorothioate
  modified_base 4..5: mod_base = OTHER; note = 5-methyl-2'-deoxycytidine 3'-phosphorothioate
  modified_base 6: mod_base = OTHER; note = 2'-deoxyadenosine 3'-phosphorothioate
  modified_base 7..8: mod_base = OTHER; note = 2'-deoxythymidine 3'-phosphorothioate
  modified_base 9: mod_base = OTHER; note = 5-methyl-2'-deoxycytidine 3'-phosphorothioate
  modified_base 10: mod_base = OTHER; note = 2'-deoxyadenosine 3'-phosphorothioate
  modified_base 11..12: mod_base = OTHER; note = 5-methyl-2'-deoxycytidine 3'-phosphorothioate
  modified_base 13: mod_base = OTHER; note = 2'-deoxyadenosine 3'-phosphorothioate
  modified_base 14: mod_base = OTHER; note = cEt adenosine 3'-phosphorothioate
  modified_base 15: mod_base = OTHER; note = cEt 5-methylcytidine 3'-phosphorothioate
  modified_base 16: mod_base = OTHER; note = cEt adenosine
tccccattcaccaaca

SEQ ID NO: 968 - DNA, 16 bp, synthetic construct
  source 1..16: mol_type = other DNA
  modified_base 1: mod_base = OTHER; note = cEt guanosine 3'-phosphorothioate
  modified_base 2: mod_base = OTHER; note = cEt thymidine 3'-phosphorothioate
  modified_base 3: mod_base = OTHER; note = cEt 5-methylcytidine 3'-phosphorothioate
  modified_base 4..6: mod_base = OTHER; note = 5-methyl-2'-deoxycytidine 3'-phosphorothioate
  modified_base 7: mod_base = OTHER; note = 2'-deoxyadenosine 3'-phosphorothioate
  modified_base 8..9: mod_base = OTHER; note = 2'-deoxythymidine 3'-phosphorothioate
  modified_base 10: mod_base = OTHER; note = 5-methyl-2'-deoxycytidine 3'-phosphorothioate
  modified_base 11: mod_base = OTHER; note = 2'-deoxyadenosine 3'-phosphorothioate
  modified_base 12..13: mod_base = OTHER; note = 5-methyl-2'-deoxycytidine 3'-phosphorothioate
  modified_base 14..15: mod_base = OTHER; note = cEt adenosine 3'-phosphorothioate
  modified_base 16: mod_base = OTHER; note = cEt 5-methylcytidine
gtccccattcaccaac

SEQ ID NO: 969 - DNA, 16 bp, synthetic construct
  source 1..16: mol_type = other DNA
  modified_base 1..2: mod_base = OTHER; note = cEt guanosine 3'-phosphorothioate
  modified_base 3: mod_base = OTHER; note = cEt thymidine 3'-phosphorothioate
  modified_base 4..7: mod_base = OTHER; note = 5-methyl-2'-deoxycytidine 3'-phosphorothioate
  modified_base 8: mod_base = OTHER; note = 2'-deoxyadenosine 3'-phosphorothioate
  modified_base 9..10: mod_base = OTHER; note = 2'-deoxythymidine 3'-phosphorothioate
  modified_base 11: mod_base = OTHER; note = 5-methyl-2'-deoxycytidine 3'-phosphorothioate
  modified_base 12: mod_base = OTHER; note = 2'-deoxyadenosine 3'-phosphorothioate
  modified_base 13: mod_base = OTHER; note = 5-methyl-2'-deoxycytidine 3'-phosphorothioate
  modified_base 14: mod_base = OTHER; note = cEt 5-methylcytidine 3'-phosphorothioate
  modified_base 15: mod_base = OTHER; note = cEt adenosine 3'-phosphorothioate
  modified_base 16: mod_base = OTHER; note = cEt adenosine
ggtccccattcaccaa

SEQ ID NO: 970 - DNA, 16 bp, synthetic construct
  source 1..16: mol_type = other DNA
  modified_base 1: mod_base = OTHER; note = cEt 5-methylcytidine 3'-phosphorothioate
  modified_base 2..3: mod_base = OTHER; note = cEt guanosine 3'-phosphorothioate
  modified_base 4: mod_base = OTHER; note = 2'-deoxythymidine 3'-phosphorothioate
  modified_base 5..8: mod_base = OTHER; note = 5-methyl-2'-deoxycytidine 3'-phosphorothioate
  modified_base 9: mod_base = OTHER; note = 2'-deoxyadenosine 3'-phosphorothioate
  modified_base 10..11: mod_base = OTHER; note = 2'-deoxythymidine 3'-phosphorothioate
  modified_base 12: mod_base = OTHER; note = 5-methyl-2'-deoxycytidine 3'-phosphorothioate
  modified_base 13: mod_base = OTHER; note = 2'-deoxyadenosine 3'-phosphorothioate
  modified_base 14..15: mod_base = OTHER; note = cEt 5-methylcytidine 3'-phosphorothioate
  modified_base 16: mod_base = OTHER; note = cEt adenosine
cggtccccattcacca

SEQ ID NO: 971 - DNA, 16 bp, synthetic construct
  source 1..16: mol_type = other DNA
  modified_base 1..2: mod_base = OTHER; note = cEt 5-methylcytidine 3'-phosphorothioate
  modified_base 3: mod_base = OTHER; note = cEt guanosine 3'-phosphorothioate
  modified_base 4: mod_base = OTHER; note = 2'-deoxyguanosine 3'-phosphorothioate
  modified_base 5: mod_base = OTHER; note = 2'-deoxythymidine 3'-phosphorothioate
  modified_base 6..9: mod_base = OTHER; note = 5-methyl-2'-deoxycytidine 3'-phosphorothioate
  modified_base 10: mod_base = OTHER; note = 2'-deoxyadenosine 3'-phosphorothioate
  modified_base 11..12: mod_base = OTHER; note = 2'-deoxythymidine 3'-phosphorothioate
  modified_base 13: mod_base = OTHER; note = 5-methyl-2'-deoxycytidine 3'-phosphorothioate
  modified_base 14: mod_base = OTHER; note = cEt adenosine 3'-phosphorothioate
  modified_base 15: mod_base = OTHER; note = cEt 5-methylcytidine 3'-phosphorothioate
  modified_base 16: mod_base = OTHER; note = cEt 5-methylcytidine
ccggtccccattcacc

SEQ ID NO: 972 - DNA, 16 bp, synthetic construct
  source 1..16: mol_type = other DNA
  modified_base 1: mod_base = OTHER; note = cEt guanosine 3'-phosphorothioate
  modified_base 2..3: mod_base = OTHER; note = cEt 5-methylcytidine 3'-phosphorothioate
  modified_base 4..5: mod_base = OTHER; note = 2'-deoxyguanosine 3'-phosphorothioate
  modified_base 6: mod_base = OTHER; note = 2'-deoxythymidine 3'-phosphorothioate
  modified_base 7..10: mod_base = OTHER; note = 5-methyl-2'-deoxycytidine 3'-phosphorothioate
  modified_base 11: mod_base = OTHER; note = 2'-deoxyadenosine 3'-phosphorothioate
  modified_base 12..13: mod_base = OTHER; note = 2'-deoxythymidine 3'-phosphorothioate
  modified_base 14: mod_base = OTHER; note = cEt 5-methylcytidine 3'-phosphorothioate
  modified_base 15: mod_base = OTHER; note = cEt adenosine 3'-phosphorothioate
  modified_base 16: mod_base = OTHER; note = cEt 5-methylcytidine
gccggtccccattcac

SEQ ID NO: 973 - DNA, 16 bp, synthetic construct
  source 1..16: mol_type = other DNA
  modified_base 1: mod_base = OTHER; note = cEt 5-methylcytidine 3'-phosphorothioate
  modified_base 3: mod_base = OTHER; note = cEt 5-methylcytidine 3'-phosphorothioate
  modified_base 2: mod_base = OTHER; note = cEt guanosine 3'-phosphorothioate
  modified_base 4: mod_base = OTHER; note = 5-methyl-2'-deoxycytidine 3'-phosphorothioate
  modified_base 5..6: mod_base = OTHER; note = 2'-deoxyguanosine 3'-phosphorothioate
  modified_base 7: mod_base = OTHER; note = 2'-deoxythymidine 3'-phosphorothioate
  modified_base 8..11: mod_base = OTHER; note = 5-methyl-2'-deoxycytidine 3'-phosphorothioate
  modified_base 12: mod_base = OTHER; note = 2'-deoxyadenosine 3'-phosphorothioate
  modified_base 13: mod_base = OTHER; note = 2'-deoxythymidine 3'-phosphorothioate
  modified_base 14: mod_base = OTHER; note = cEt thymidine 3'-phosphorothioate
  modified_base 15: mod_base = OTHER; note = cEt 5-methylcytidine 3'-phosphorothioate
  modified_base 16: mod_base = OTHER; note = cEt adenosine
cgccggtccccattca

SEQ ID NO: 974 - DNA, 16 bp, synthetic construct
  source 1..16: mol_type = other DNA
  modified_base 1..2: mod_base = OTHER; note = cEt 5-methylcytidine 3'-phosphorothioate
  modified_base 3: mod_base = OTHER; note = cEt guanosine 3'-phosphorothioate
  modified_base 4..5: mod_base = OTHER; note = 5-methyl-2'-deoxycytidine 3'-phosphorothioate
  modified_base 6..7: mod_base = OTHER; note = 2'-deoxyguanosine 3'-phosphorothioate
  modified_base 8: mod_base = OTHER; note = 2'-deoxythymidine 3'-phosphorothioate
  modified_base 9..12: mod_base = OTHER; note = 5-methyl-2'-deoxycytidine 3'-phosphorothioate
  modified_base 13: mod_base = OTHER; note = 2'-deoxyadenosine 3'-phosphorothioate
  modified_base 14..15: mod_base = OTHER; note = cEt thymidine 3'-phosphorothioate
  modified_base 16: mod_base = OTHER; note = cEt 5-methylcytidine
ccgccggtccccattc

SEQ ID NO: 975 - DNA, 16 bp, synthetic construct
  source 1..16: mol_type = other DNA
  modified_base 1: mod_base = OTHER; note = cEt adenosine 3'-phosphorothioate
  modified_base 2..3: mod_base = OTHER; note = cEt 5-methylcytidine 3'-phosphorothioate
  modified_base 4: mod_base = OTHER; note = 2'-deoxyguanosine 3'-phosphorothioate
  modified_base 5..6: mod_base = OTHER; note = 5-methyl-2'-deoxycytidine 3'-phosphorothioate
  modified_base 7..8: mod_base = OTHER; note = 2'-deoxyguanosine 3'-phosphorothioate
  modified_base 9: mod_base = OTHER; note = 2'-deoxythymidine 3'-phosphorothioate
  modified_base 10..13: mod_base = OTHER; note = 5-methyl-2'-deoxycytidine 3'-phosphorothioate
  modified_base 14: mod_base = OTHER; note = cEt adenosine 3'-phosphorothioate
  modified_base 15: mod_base = OTHER; note = cEt thymidine 3'-phosphorothioate
  modified_base 16: mod_base = OTHER; note = cEt thymidine
accgccggtccccatt

SEQ ID NO: 976 - DNA, 16 bp, synthetic construct
  source 1..16: mol_type = other DNA
  modified_base 1: mod_base = OTHER; note = cEt 5-methylcytidine 3'-phosphorothioate
  modified_base 3: mod_base = OTHER; note = cEt 5-methylcytidine 3'-phosphorothioate
  modified_base 2: mod_base = OTHER; note = cEt adenosine 3'-phosphorothioate
  modified_base 4: mod_base = OTHER; note = 5-methyl-2'-deoxycytidine 3'-phosphorothioate
  modified_base 5: mod_base = OTHER; note = 2'-deoxyguanosine 3'-phosphorothioate
  modified_base 6..7: mod_base = OTHER; note = 5-methyl-2'-deoxycytidine 3'-phosphorothioate
  modified_base 8..9: mod_base = OTHER; note = 2'-deoxyguanosine 3'-phosphorothioate
  modified_base 10: mod_base = OTHER; note = 2'-deoxythymidine 3'-phosphorothioate
  modified_base 11..13: mod_base = OTHER; note = 5-methyl-2'-deoxycytidine 3'-phosphorothioate
  modified_base 14: mod_base = OTHER; note = cEt 5-methylcytidine 3'-phosphorothioate
  modified_base 15: mod_base = OTHER; note = cEt adenosine 3'-phosphorothioate
  modified_base 16: mod_base = OTHER; note = cEt thymidine
caccgccggtccccat

SEQ ID NO: 977 - DNA, 16 bp, synthetic construct
  source 1..16: mol_type = other DNA
  modified_base 1..2: mod_base = OTHER; note = cEt 5-methylcytidine 3'-phosphorothioate
  modified_base 3: mod_base = OTHER; note = cEt adenosine 3'-phosphorothioate
  modified_base 4..5: mod_base = OTHER; note = 5-methyl-2'-deoxycytidine 3'-phosphorothioate
  modified_base 6: mod_base = OTHER; note = 2'-deoxyguanosine 3'-phosphorothioate
  modified_base 7..8: mod_base = OTHER; note = 5-methyl-2'-deoxycytidine 3'-phosphorothioate
  modified_base 9..10: mod_base = OTHER; note = 2'-deoxyguanosine 3'-phosphorothioate
  modified_base 11: mod_base = OTHER; note = 2'-deoxythymidine 3'-phosphorothioate
  modified_base 12..13: mod_base = OTHER; note = 5-methyl-2'-deoxycytidine 3'-phosphorothioate
  modified_base 14..15: mod_base = OTHER; note = cEt 5-methylcytidine 3'-phosphorothioate
  modified_base 16: mod_base = OTHER; note = cEt adenosine
ccaccgccggtcccca

SEQ ID NO: 978 - DNA, 16 bp, synthetic construct
  source 1..16: mol_type = other DNA
  modified_base 1: mod_base = OTHER; note = cEt thymidine 3'-phosphorothioate
  modified_base 2..3: mod_base = OTHER; note = cEt 5-methylcytidine 3'-phosphorothioate
  modified_base 4: mod_base = OTHER; note = 2'-deoxyadenosine 3'-phosphorothioate
  modified_base 5..6: mod_base = OTHER; note = 5-methyl-2'-deoxycytidine 3'-phosphorothioate
  modified_base 7: mod_base = OTHER; note = 2'-deoxyguanosine 3'-phosphorothioate
  modified_base 8..9: mod_base = OTHER; note = 5-methyl-2'-deoxycytidine 3'-phosphorothioate
  modified_base 10..11: mod_base = OTHER; note = 2'-deoxyguanosine 3'-phosphorothioate
  modified_base 12: mod_base = OTHER; note = 2'-deoxythymidine 3'-phosphorothioate
  modified_base 13: mod_base = OTHER; note = 5-methyl-2'-deoxycytidine 3'-phosphorothioate
  modified_base 14..15: mod_base = OTHER; note = cEt 5-methylcytidine 3'-phosphorothioate
  modified_base 16: mod_base = OTHER; note = cEt 5-methylcytidine
tccaccgccggtcccc

SEQ ID NO: 979 - DNA, 16 bp, synthetic construct
  source 1..16: mol_type = other DNA
  modified_base 1: mod_base = OTHER; note = cEt adenosine 3'-phosphorothioate
  modified_base 2: mod_base = OTHER; note = cEt thymidine 3'-phosphorothioate
  modified_base 3: mod_base = OTHER; note = cEt 5-methylcytidine 3'-phosphorothioate
  modified_base 4: mod_base = OTHER; note = 5-methyl-2'-deoxycytidine 3'-phosphorothioate
  modified_base 5: mod_base = OTHER; note = 2'-deoxyadenosine 3'-phosphorothioate
  modified_base 6..7: mod_base = OTHER; note = 5-methyl-2'-deoxycytidine 3'-phosphorothioate
  modified_base 9..10: mod_base = OTHER; note = 5-methyl-2'-deoxycytidine 3'-phosphorothioate
  modified_base 8: mod_base = OTHER; note = 2'-deoxyguanosine 3'-phosphorothioate
  modified_base 11..12: mod_base = OTHER; note = 2'-deoxyguanosine 3'-phosphorothioate
  modified_base 13: mod_base = OTHER; note = 2'-deoxythymidine 3'-phosphorothioate
  modified_base 14..15: mod_base = OTHER; note = cEt 5-methylcytidine 3'-phosphorothioate
  modified_base 16: mod_base = OTHER; note = cEt 5-methylcytidine
atccaccgccggtccc

SEQ ID NO: 980 - DNA, 16 bp, synthetic construct
  source 1..16: mol_type = other DNA
  modified_base 1: mod_base = OTHER; note = cEt guanosine 3'-phosphorothioate
  modified_base 2: mod_base = OTHER; note = cEt adenosine 3'-phosphorothioate
  modified_base 3: mod_base = OTHER; note = cEt thymidine 3'-phosphorothioate
  modified_base 4..5: mod_base = OTHER; note = 5-methyl-2'-deoxycytidine 3'-phosphorothioate
  modified_base 6: mod_base = OTHER; note = 2'-deoxyadenosine 3'-phosphorothioate
  modified_base 7..8: mod_base = OTHER; note = 5-methyl-2'-deoxycytidine 3'-phosphorothioate
  modified_base 9: mod_base = OTHER; note = 2'-deoxyguanosine 3'-phosphorothioate
  modified_base 10..11: mod_base = OTHER; note = 5-methyl-2'-deoxycytidine 3'-phosphorothioate
  modified_base 12..13: mod_base = OTHER; note = 2'-deoxyguanosine 3'-phosphorothioate
  modified_base 14: mod_base = OTHER; note = cEt thymidine 3'-phosphorothioate
  modified_base 15: mod_base = OTHER; note = cEt 5-methylcytidine 3'-phosphorothioate
  modified_base 16: mod_base = OTHER; note = cEt 5-methylcytidine
gatccaccgccggtcc

SEQ ID NO: 981 - DNA, 16 bp, synthetic construct
  source 1..16: mol_type = other DNA
  modified_base 1: mod_base = OTHER; note = cEt thymidine 3'-phosphorothioate
  modified_base 2: mod_base = OTHER; note = cEt guanosine 3'-phosphorothioate
  modified_base 3: mod_base = OTHER; note = cEt adenosine 3'-phosphorothioate
  modified_base 4: mod_base = OTHER; note = 2'-deoxythymidine 3'-phosphorothioate
  modified_base 5..6: mod_base = OTHER; note = 5-methyl-2'-deoxycytidine 3'-phosphorothioate
  modified_base 7: mod_base = OTHER; note = 2'-deoxyadenosine 3'-phosphorothioate
  modified_base 8..9: mod_base = OTHER; note = 5-methyl-2'-deoxycytidine 3'-phosphorothioate
  modified_base 10: mod_base = OTHER; note = 2'-deoxyguanosine 3'-phosphorothioate
  modified_base 11..12: mod_base = OTHER; note = 5-methyl-2'-deoxycytidine 3'-phosphorothioate
  modified_base 13: mod_base = OTHER; note = 2'-deoxyguanosine 3'-phosphorothioate
  modified_base 14: mod_base = OTHER; note = cEt guanosine 3'-phosphorothioate
  modified_base 15: mod_base = OTHER; note = cEt thymidine 3'-phosphorothioate
  modified_base 16: mod_base = OTHER; note = cEt 5-methylcytidine
tgatccaccgccggtc

SEQ ID NO: 982 - DNA, 16 bp, synthetic construct
  source 1..16: mol_type = other DNA
  modified_base 1: mod_base = OTHER; note = cEt guanosine 3'-phosphorothioate
  modified_base 3: mod_base = OTHER; note = cEt guanosine 3'-phosphorothioate
  modified_base 2: mod_base = OTHER; note = cEt thymidine 3'-phosphorothioate
  modified_base 4: mod_base = OTHER; note = 2'-deoxyadenosine 3'-phosphorothioate
  modified_base 5: mod_base = OTHER; note = 2'-deoxythymidine 3'-phosphorothioate
  modified_base 6..7: mod_base = OTHER; note = 5-methyl-2'-deoxycytidine 3'-phosphorothioate
  modified_base 8: mod_base = OTHER; note = 2'-deoxyadenosine 3'-phosphorothioate
  modified_base 9..10: mod_base = OTHER; note = 5-methyl-2'-deoxycytidine 3'-phosphorothioate
  modified_base 11: mod_base = OTHER; note = 2'-deoxyguanosine 3'-phosphorothioate
  modified_base 12..13: mod_base = OTHER; note = 5-methyl-2'-deoxycytidine 3'-phosphorothioate
  modified_base 14..15: mod_base = OTHER; note = cEt guanosine 3'-phosphorothioate
  modified_base 16: mod_base = OTHER; note = cEt thymidine
gtgatccaccgccggt

SEQ ID NO: 983 - DNA, 16 bp, synthetic construct
  source 1..16: mol_type = other DNA
  modified_base 1: mod_base = OTHER; note = cEt 5-methylcytidine 3'-phosphorothioate
  modified_base 2: mod_base = OTHER; note = cEt guanosine 3'-phosphorothioate
  modified_base 3: mod_base = OTHER; note = cEt thymidine 3'-phosphorothioate
  modified_base 4: mod_base = OTHER; note = 2'-deoxyguanosine 3'-phosphorothioate
  modified_base 5: mod_base = OTHER; note = 2'-deoxyadenosine 3'-phosphorothioate
  modified_base 6: mod_base = OTHER; note = 2'-deoxythymidine 3'-phosphorothioate
  modified_base 7..8: mod_base = OTHER; note = 5-methyl-2'-deoxycytidine 3'-phosphorothioate
  modified_base 9: mod_base = OTHER; note = 2'-deoxyadenosine 3'-phosphorothioate
  modified_base 10..11: mod_base = OTHER; note = 5-methyl-2'-deoxycytidine 3'-phosphorothioate
  modified_base 12: mod_base = OTHER; note = 2'-deoxyguanosine 3'-phosphorothioate
  modified_base 13: mod_base = OTHER; note = 5-methyl-2'-deoxycytidine 3'-phosphorothioate
  modified_base 14: mod_base = OTHER; note = cEt 5-methylcytidine 3'-phosphorothioate
  modified_base 15: mod_base = OTHER; note = cEt guanosine 3'-phosphorothioate
  modified_base 16: mod_base = OTHER; note = cEt guanosine
cgtgatccaccgccgg

SEQ ID NO: 984 - DNA, 16 bp, synthetic construct
  source 1..16: mol_type = other DNA
  modified_base 1: mod_base = OTHER; note = cEt 5-methylcytidine 3'-phosphorothioate
  modified_base 2: mod_base = OTHER; note = cEt adenosine 3'-phosphorothioate
  modified_base 3: mod_base = OTHER; note = cEt thymidine 3'-phosphorothioate
  modified_base 4..5: mod_base = OTHER; note = 5-methyl-2'-deoxycytidine 3'-phosphorothioate
  modified_base 6: mod_base = OTHER; note = 2'-deoxythymidine 3'-phosphorothioate
  modified_base 7..8: mod_base = OTHER; note = 2'-deoxyguanosine 3'-phosphorothioate
  modified_base 9..10: mod_base = OTHER; note = 2'-deoxyadenosine 3'-phosphorothioate
  modified_base 11..12: mod_base = OTHER; note = 2'-deoxyguanosine 3'-phosphorothioate
  modified_base 13: mod_base = OTHER; note = 5-methyl-2'-deoxycytidine 3'-phosphorothioate
  modified_base 14: mod_base = OTHER; note = cEt guanosine 3'-phosphorothioate
  modified_base 15: mod_base = OTHER; note = cEt adenosine 3'-phosphorothioate
  modified_base 16: mod_base = OTHER; note = cEt adenosine
catcctggaaggcgaa

SEQ ID NO: 985 - DNA, 16 bp, synthetic construct
  source 1..16: mol_type = other DNA
  modified_base 1: mod_base = OTHER; note = cEt thymidine 3'-phosphorothioate
  modified_base 2: mod_base = OTHER; note = cEt 5-methylcytidine 3'-phosphorothioate
  modified_base 3: mod_base = OTHER; note = cEt adenosine 3'-phosphorothioate
  modified_base 4: mod_base = OTHER; note = 2'-deoxythymidine 3'-phosphorothioate
  modified_base 5..6: mod_base = OTHER; note = 5-methyl-2'-deoxycytidine 3'-phosphorothioate
  modified_base 7: mod_base = OTHER; note = 2'-deoxythymidine 3'-phosphorothioate
  modified_base 8..9: mod_base = OTHER; note = 2'-deoxyguanosine 3'-phosphorothioate
  modified_base 10..11: mod_base = OTHER; note = 2'-deoxyadenosine 3'-phosphorothioate
  modified_base 12..13: mod_base = OTHER; note = 2'-deoxyguanosine 3'-phosphorothioate
  modified_base 14: mod_base = OTHER; note = cEt 5-methylcytidine 3'-phosphorothioate
  modified_base 15: mod_base = OTHER; note = cEt guanosine 3'-phosphorothioate
  modified_base 16: mod_base = OTHER; note = cEt adenosine
tcatcctggaaggcga

SEQ ID NO: 986 - DNA, 16 bp, synthetic construct
  source 1..16: mol_type = other DNA
  modified_base 1: mod_base = OTHER; note = cEt adenosine 3'-phosphorothioate
  modified_base 2: mod_base = OTHER; note = cEt guanosine 3'-phosphorothioate
  modified_base 3: mod_base = OTHER; note = cEt thymidine 3'-phosphorothioate
  modified_base 4: mod_base = OTHER; note = 2'-deoxythymidine 3'-phosphorothioate
  modified_base 5: mod_base = OTHER; note = 5-methyl-2'-deoxycytidine 3'-phosphorothioate
  modified_base 6: mod_base = OTHER; note = 2'-deoxythymidine 3'-phosphorothioate
  modified_base 7: mod_base = OTHER; note = 5-methyl-2'-deoxycytidine 3'-phosphorothioate
  modified_base 8: mod_base = OTHER; note = 2'-deoxyadenosine 3'-phosphorothioate
  modified_base 9: mod_base = OTHER; note = 2'-deoxythymidine 3'-phosphorothioate
  modified_base 10..11: mod_base = OTHER; note = 5-methyl-2'-deoxycytidine 3'-phosphorothioate
  modified_base 12: mod_base = OTHER; note = 2'-deoxythymidine 3'-phosphorothioate
  modified_base 13: mod_base = OTHER; note = 2'-deoxyguanosine 3'-phosphorothioate
  modified_base 14: mod_base = OTHER; note = cEt guanosine 3'-phosphorothioate
  modified_base 15: mod_base = OTHER; note = cEt adenosine 3'-phosphorothioate
  modified_base 16: mod_base = OTHER; note = cEt adenosine
agttctcatcctggaa

SEQ ID NO: 987 - DNA, 16 bp, synthetic construct
  source 1..16: mol_type = other DNA
  modified_base 1: mod_base = OTHER; note = cEt thymidine 3'-phosphorothioate
  modified_base 2: mod_base = OTHER; note = cEt adenosine 3'-phosphorothioate
  modified_base 3: mod_base = OTHER; note = cEt guanosine 3'-phosphorothioate
  modified_base 4..5: mod_base = OTHER; note = 2'-deoxythymidine 3'-phosphorothioate
  modified_base 6: mod_base = OTHER; note = 5-methyl-2'-deoxycytidine 3'-phosphorothioate
  modified_base 7: mod_base = OTHER; note = 2'-deoxythymidine 3'-phosphorothioate
  modified_base 8: mod_base = OTHER; note = 5-methyl-2'-deoxycytidine 3'-phosphorothioate
  modified_base 9: mod_base = OTHER; note = 2'-deoxyadenosine 3'-phosphorothioate
  modified_base 10: mod_base = OTHER; note = 2'-deoxythymidine 3'-phosphorothioate
  modified_base 11..12: mod_base = OTHER; note = 5-methyl-2'-deoxycytidine 3'-phosphorothioate
  modified_base 13: mod_base = OTHER; note = 2'-deoxythymidine 3'-phosphorothioate
  modified_base 14..15: mod_base = OTHER; note = cEt guanosine 3'-phosphorothioate
  modified_base 16: mod_base = OTHER; note = cEt adenosine
tagttctcatcctgga

SEQ ID NO: 988 - DNA, 16 bp, synthetic construct
  source 1..16: mol_type = other DNA
  modified_base 1: mod_base = OTHER; note = cEt guanosine 3'-phosphorothioate
  modified_base 2: mod_base = OTHER; note = cEt thymidine 3'-phosphorothioate
  modified_base 3: mod_base = OTHER; note = cEt adenosine 3'-phosphorothioate
  modified_base 4: mod_base = OTHER; note = 2'-deoxyguanosine 3'-phosphorothioate
  modified_base 5..6: mod_base = OTHER; note = 2'-deoxythymidine 3'-phosphorothioate
  modified_base 7: mod_base = OTHER; note = 5-methyl-2'-deoxycytidine 3'-phosphorothioate
  modified_base 8: mod_base = OTHER; note = 2'-deoxythymidine 3'-phosphorothioate
  modified_base 9: mod_base = OTHER; note = 5-methyl-2'-deoxycytidine 3'-phosphorothioate
  modified_base 10: mod_base = OTHER; note = 2'-deoxyadenosine 3'-phosphorothioate
  modified_base 11: mod_base = OTHER; note = 2'-deoxythymidine 3'-phosphorothioate
  modified_base 12..13: mod_base = OTHER; note = 5-methyl-2'-deoxycytidine 3'-phosphorothioate
  modified_base 14: mod_base = OTHER; note = cEt thymidine 3'-phosphorothioate
  modified_base 15: mod_base = OTHER; note = cEt guanosine 3'-phosphorothioate
  modified_base 16: mod_base = OTHER; note = cEt guanosine
gtagttctcatcctgg

SEQ ID NO: 989 - DNA, 16 bp, synthetic construct
  source 1..16: mol_type = other DNA
  modified_base 1: mod_base = OTHER; note = cEt 5-methylcytidine 3'-phosphorothioate
  modified_base 2: mod_base = OTHER; note = cEt adenosine 3'-phosphorothioate
  modified_base 3: mod_base = OTHER; note = cEt guanosine 3'-phosphorothioate
  modified_base 4: mod_base = OTHER; note = 2'-deoxyguanosine 3'-phosphorothioate
  modified_base 5: mod_base = OTHER; note = 2'-deoxythymidine 3'-phosphorothioate
  modified_base 6: mod_base = OTHER; note = 2'-deoxyadenosine 3'-phosphorothioate
  modified_base 7: mod_base = OTHER; note = 5-methyl-2'-deoxycytidine 3'-phosphorothioate
  modified_base 8: mod_base = OTHER; note = 2'-deoxyadenosine 3'-phosphorothioate
  modified_base 9..10: mod_base = OTHER; note = 2'-deoxyguanosine 3'-phosphorothioate
  modified_base 11: mod_base = OTHER; note = 2'-deoxythymidine 3'-phosphorothioate
  modified_base 12: mod_base = OTHER; note = 2'-deoxyadenosine 3'-phosphorothioate
  modified_base 13: mod_base = OTHER; note = 2'-deoxyguanosine 3'-phosphorothioate
  modified_base 14..15: mod_base = OTHER; note = cEt thymidine 3'-phosphorothioate
  modified_base 16: mod_base = OTHER; note = cEt 5-methylcytidine
caggtacaggtagttc

SEQ ID NO: 990 - DNA, 16 bp, synthetic construct
  source 1..16: mol_type = other DNA
  modified_base 1..2: mod_base = OTHER; note = cEt 5-methylcytidine 3'-phosphorothioate
  modified_base 3: mod_base = OTHER; note = cEt adenosine 3'-phosphorothioate
  modified_base 4..5: mod_base = OTHER; note = 2'-deoxyguanosine 3'-phosphorothioate
  modified_base 6: mod_base = OTHER; note = 2'-deoxythymidine 3'-phosphorothioate
  modified_base 7: mod_base = OTHER; note = 2'-deoxyadenosine 3'-phosphorothioate
  modified_base 8: mod_base = OTHER; note = 5-methyl-2'-deoxycytidine 3'-phosphorothioate
  modified_base 9: mod_base = OTHER; note = 2'-deoxyadenosine 3'-phosphorothioate
  modified_base 10..11: mod_base = OTHER; note = 2'-deoxyguanosine 3'-phosphorothioate
  modified_base 12: mod_base = OTHER; note = 2'-deoxythymidine 3'-phosphorothioate
  modified_base 13: mod_base = OTHER; note = 2'-deoxyadenosine 3'-phosphorothioate
  modified_base 14: mod_base = OTHER; note = cEt guanosine 3'-phosphorothioate
  modified_base 15: mod_base = OTHER; note = cEt thymidine 3'-phosphorothioate
  modified_base 16: mod_base = OTHER; note = cEt thymidine
ccaggtacaggtagtt

SEQ ID NO: 991 - DNA, 16 bp, synthetic construct
  source 1..16: mol_type = other DNA
  modified_base 1: mod_base = OTHER; note = cEt guanosine 3'-phosphorothioate
  modified_base 2: mod_base = OTHER; note = cEt adenosine 3'-phosphorothioate
  modified_base 3: mod_base = OTHER; note = cEt 5-methylcytidine 3'-phosphorothioate
  modified_base 4: mod_base = OTHER; note = 5-methyl-2'-deoxycytidine 3'-phosphorothioate
  modified_base 5: mod_base = OTHER; note = 2'-deoxyadenosine 3'-phosphorothioate
  modified_base 6..7: mod_base = OTHER; note = 2'-deoxyguanosine 3'-phosphorothioate
  modified_base 8: mod_base = OTHER; note = 2'-deoxythymidine 3'-phosphorothioate
  modified_base 9: mod_base = OTHER; note = 2'-deoxyadenosine 3'-phosphorothioate
  modified_base 10: mod_base = OTHER; note = 5-methyl-2'-deoxycytidine 3'-phosphorothioate
  modified_base 11: mod_base = OTHER; note = 2'-deoxyadenosine 3'-phosphorothioate
  modified_base 12..13: mod_base = OTHER; note = 2'-deoxyguanosine 3'-phosphorothioate
  modified_base 14: mod_base = OTHER; note = cEt thymidine 3'-phosphorothioate
  modified_base 15: mod_base = OTHER; note = cEt adenosine 3'-phosphorothioate
  modified_base 16: mod_base = OTHER; note = cEt guanosine
gaccaggtacaggtag

SEQ ID NO: 992 - DNA, 16 bp, synthetic construct
  source 1..16: mol_type = other DNA
  modified_base 1: mod_base = OTHER; note = cEt 5-methylcytidine 3'-phosphorothioate
  modified_base 3: mod_base = OTHER; note = cEt 5-methylcytidine 3'-phosphorothioate
  modified_base 2: mod_base = OTHER; note = cEt thymidine 3'-phosphorothioate
  modified_base 4: mod_base = OTHER; note = 5-methyl-2'-deoxycytidine 3'-phosphorothioate
  modified_base 5: mod_base = OTHER; note = 2'-deoxyadenosine 3'-phosphorothioate
  modified_base 6: mod_base = OTHER; note = 2'-deoxythymidine 3'-phosphorothioate
  modified_base 7: mod_base = OTHER; note = 2'-deoxyguanosine 3'-phosphorothioate
  modified_base 8: mod_base = OTHER; note = 2'-deoxyadenosine 3'-phosphorothioate
  modified_base 9..10: mod_base = OTHER; note = 5-methyl-2'-deoxycytidine 3'-phosphorothioate
  modified_base 11: mod_base = OTHER; note = 2'-deoxyadenosine 3'-phosphorothioate
  modified_base 12..13: mod_base = OTHER; note = 2'-deoxyguanosine 3'-phosphorothioate
  modified_base 14: mod_base = OTHER; note = cEt thymidine 3'-phosphorothioate
  modified_base 15: mod_base = OTHER; note = cEt adenosine 3'-phosphorothioate
  modified_base 16: mod_base = OTHER; note = cEt 5-methylcytidine
ctccatgaccaggtac

SEQ ID NO: 993 - DNA, 16 bp, synthetic construct
  source 1..16: mol_type = other DNA
  modified_base 1: mod_base = OTHER; note = cEt adenosine 3'-phosphorothioate
  modified_base 2: mod_base = OTHER; note = cEt 5-methylcytidine 3'-phosphorothioate
  modified_base 3: mod_base = OTHER; note = cEt thymidine 3'-phosphorothioate
  modified_base 4..5: mod_base = OTHER; note = 5-methyl-2'-deoxycytidine 3'-phosphorothioate
  modified_base 6: mod_base = OTHER; note = 2'-deoxyadenosine 3'-phosphorothioate
  modified_base 7: mod_base = OTHER; note = 2'-deoxythymidine 3'-phosphorothioate
  modified_base 8: mod_base = OTHER; note = 2'-deoxyguanosine 3'-phosphorothioate
  modified_base 9: mod_base = OTHER; note = 2'-deoxyadenosine 3'-phosphorothioate
  modified_base 10..11: mod_base = OTHER; note = 5-methyl-2'-deoxycytidine 3'-phosphorothioate
  modified_base 12: mod_base = OTHER; note = 2'-deoxyadenosine 3'-phosphorothioate
  modified_base 13: mod_base = OTHER; note = 2'-deoxyguanosine 3'-phosphorothioate
  modified_base 14: mod_base = OTHER; note = cEt guanosine 3'-phosphorothioate
  modified_base 15: mod_base = OTHER; note = cEt thymidine 3'-phosphorothioate
  modified_base 16: mod_base = OTHER; note = cEt adenosine
actccatgaccaggta

SEQ ID NO: 994 - DNA, 16 bp, synthetic construct
  source 1..16: mol_type = other DNA
  modified_base 1: mod_base = OTHER; note = cEt thymidine 3'-phosphorothioate
  modified_base 2: mod_base = OTHER; note = cEt adenosine 3'-phosphorothioate
  modified_base 3: mod_base = OTHER; note = cEt 5-methylcytidine 3'-phosphorothioate
  modified_base 4: mod_base = OTHER; note = 2'-deoxythymidine 3'-phosphorothioate
  modified_base 5..6: mod_base = OTHER; note = 5-methyl-2'-deoxycytidine 3'-phosphorothioate
  modified_base 7: mod_base = OTHER; note = 2'-deoxyadenosine 3'-phosphorothioate
  modified_base 8: mod_base = OTHER; note = 2'-deoxythymidine 3'-phosphorothioate
  modified_base 9: mod_base = OTHER; note = 2'-deoxyguanosine 3'-phosphorothioate
  modified_base 10: mod_base = OTHER; note = 2'-deoxyadenosine 3'-phosphorothioate
  modified_base 11..12: mod_base = OTHER; note = 5-methyl-2'-deoxycytidine 3'-phosphorothioate
  modified_base 14..15: mod_base = OTHER; note = cEt guanosine 3'-phosphorothioate
  modified_base 16: mod_base = OTHER; note = cEt thymidine
  modified_base 13: mod_base = OTHER; note = 2'-deoxyadenosine 3'-phosphorothioate
tactccatgaccaggt

SEQ ID NO: 995 - DNA, 16 bp, synthetic construct
  source 1..16: mol_type = other DNA
  modified_base 1: mod_base = OTHER; note = cEt adenosine 3'-phosphorothioate
  modified_base 3: mod_base = OTHER; note = cEt adenosine 3'-phosphorothioate
  modified_base 2: mod_base = OTHER; note = cEt thymidine 3'-phosphorothioate
  modified_base 4: mod_base = OTHER; note = 5-methyl-2'-deoxycytidine 3'-phosphorothioate
  modified_base 5: mod_base = OTHER; note = 2'-deoxythymidine 3'-phosphorothioate
  modified_base 6..7: mod_base = OTHER; note = 5-methyl-2'-deoxycytidine 3'-phosphorothioate
  modified_base 8: mod_base = OTHER; note = 2'-deoxyadenosine 3'-phosphorothioate
  modified_base 9: mod_base = OTHER; note = 2'-deoxythymidine 3'-phosphorothioate
  modified_base 10: mod_base = OTHER; note = 2'-deoxyguanosine 3'-phosphorothioate
  modified_base 11: mod_base = OTHER; note = 2'-deoxyadenosine 3'-phosphorothioate
  modified_base 12..13: mod_base = OTHER; note = 5-methyl-2'-deoxycytidine 3'-phosphorothioate
  modified_base 14: mod_base = OTHER; note = cEt adenosine 3'-phosphorothioate
  modified_base 15: mod_base = OTHER; note = cEt guanosine 3'-phosphorothioate
  modified_base 16: mod_base = OTHER; note = cEt guanosine
atactccatgaccagg

SEQ ID NO: 996 - DNA, 16 bp, synthetic construct
  source 1..16: mol_type = other DNA
  modified_base 1..2: mod_base = OTHER; note = cEt adenosine 3'-phosphorothioate
  modified_base 3: mod_base = OTHER; note = cEt thymidine 3'-phosphorothioate
  modified_base 4: mod_base = OTHER; note = 2'-deoxyadenosine 3'-phosphorothioate
  modified_base 5: mod_base = OTHER; note = 5-methyl-2'-deoxycytidine 3'-phosphorothioate
  modified_base 6: mod_base = OTHER; note = 2'-deoxythymidine 3'-phosphorothioate
  modified_base 7..8: mod_base = OTHER; note = 5-methyl-2'-deoxycytidine 3'-phosphorothioate
  modified_base 9: mod_base = OTHER; note = 2'-deoxyadenosine 3'-phosphorothioate
  modified_base 10: mod_base = OTHER; note = 2'-deoxythymidine 3'-phosphorothioate
  modified_base 11: mod_base = OTHER; note = 2'-deoxyguanosine 3'-phosphorothioate
  modified_base 12: mod_base = OTHER; note = 2'-deoxyadenosine 3'-phosphorothioate
  modified_base 13: mod_base = OTHER; note = 5-methyl-2'-deoxycytidine 3'-phosphorothioate
  modified_base 14: mod_base = OTHER; note = cEt 5-methylcytidine 3'-phosphorothioate
  modified_base 15: mod_base = OTHER; note = cEt adenosine 3'-phosphorothioate
  modified_base 16: mod_base = OTHER; note = cEt guanosine
aatactccatgaccag

SEQ ID NO: 997 - DNA, 16 bp, synthetic construct
  source 1..16: mol_type = other DNA
  modified_base 1: mod_base = OTHER; note = cEt thymidine 3'-phosphorothioate
  modified_base 2..3: mod_base = OTHER; note = cEt adenosine 3'-phosphorothioate
  modified_base 4: mod_base = OTHER; note = 2'-deoxythymidine 3'-phosphorothioate
  modified_base 5: mod_base = OTHER; note = 2'-deoxyadenosine 3'-phosphorothioate
  modified_base 6: mod_base = OTHER; note = 5-methyl-2'-deoxycytidine 3'-phosphorothioate
  modified_base 7: mod_base = OTHER; note = 2'-deoxythymidine 3'-phosphorothioate
  modified_base 8..9: mod_base = OTHER; note = 5-methyl-2'-deoxycytidine 3'-phosphorothioate
  modified_base 10: mod_base = OTHER; note = 2'-deoxyadenosine 3'-phosphorothioate
  modified_base 11: mod_base = OTHER; note = 2'-deoxythymidine 3'-phosphorothioate
  modified_base 12: mod_base = OTHER; note = 2'-deoxyguanosine 3'-phosphorothioate
  modified_base 13: mod_base = OTHER; note = 2'-deoxyadenosine 3'-phosphorothioate
  modified_base 14..15: mod_base = OTHER; note = cEt 5-methylcytidine 3'-phosphorothioate
  modified_base 16: mod_base = OTHER; note = cEt adenosine
taatactccatgacca

SEQ ID NO: 998 - DNA, 16 bp, synthetic construct
  source 1..16: mol_type = other DNA
  modified_base 1: mod_base = OTHER; note = cEt guanosine 3'-phosphorothioate
  modified_base 2: mod_base = OTHER; note = cEt thymidine 3'-phosphorothioate
  modified_base 3: mod_base = OTHER; note = cEt adenosine 3'-phosphorothioate
  modified_base 4: mod_base = OTHER; note = 2'-deoxyadenosine 3'-phosphorothioate
  modified_base 5: mod_base = OTHER; note = 2'-deoxythymidine 3'-phosphorothioate
  modified_base 6: mod_base = OTHER; note = 2'-deoxyadenosine 3'-phosphorothioate
  modified_base 7: mod_base = OTHER; note = 5-methyl-2'-deoxycytidine 3'-phosphorothioate
  modified_base 8: mod_base = OTHER; note = 2'-deoxythymidine 3'-phosphorothioate
  modified_base 9..10: mod_base = OTHER; note = 5-methyl-2'-deoxycytidine 3'-phosphorothioate
  modified_base 11: mod_base = OTHER; note = 2'-deoxyadenosine 3'-phosphorothioate
  modified_base 12: mod_base = OTHER; note = 2'-deoxythymidine 3'-phosphorothioate
  modified_base 13: mod_base = OTHER; note = 2'-deoxyguanosine 3'-phosphorothioate
  modified_base 14: mod_base = OTHER; note = cEt adenosine 3'-phosphorothioate
  modified_base 15: mod_base = OTHER; note = cEt 5-methylcytidine 3'-phosphorothioate
  modified_base 16: mod_base = OTHER; note = cEt 5-methylcytidine
gtaatactccatgacc

SEQ ID NO: 999 - DNA, 16 bp, synthetic construct
  source 1..16: mol_type = other DNA
  modified_base 1: mod_base = OTHER; note = cEt 5-methylcytidine 3'-phosphorothioate
  modified_base 2: mod_base = OTHER; note = cEt guanosine 3'-phosphorothioate
  modified_base 3: mod_base = OTHER; note = cEt thymidine 3'-phosphorothioate
  modified_base 4..5: mod_base = OTHER; note = 2'-deoxyadenosine 3'-phosphorothioate
  modified_base 6: mod_base = OTHER; note = 2'-deoxythymidine 3'-phosphorothioate
  modified_base 7: mod_base = OTHER; note = 2'-deoxyadenosine 3'-phosphorothioate
  modified_base 8: mod_base = OTHER; note = 5-methyl-2'-deoxycytidine 3'-phosphorothioate
  modified_base 9: mod_base = OTHER; note = 2'-deoxythymidine 3'-phosphorothioate
  modified_base 10..11: mod_base = OTHER; note = 5-methyl-2'-deoxycytidine 3'-phosphorothioate
  modified_base 12: mod_base = OTHER; note = 2'-deoxyadenosine 3'-phosphorothioate
  modified_base 13: mod_base = OTHER; note = 2'-deoxythymidine 3'-phosphorothioate
  modified_base 14: mod_base = OTHER; note = cEt guanosine 3'-phosphorothioate
  modified_base 15: mod_base = OTHER; note = cEt adenosine 3'-phosphorothioate
  modified_base 16: mod_base = OTHER; note = cEt 5-methylcytidine
cgtaatactccatgac

SEQ ID NO: 1000 - DNA, 16 bp, synthetic construct
  source 1..16: mol_type = other DNA
  modified_base 1: mod_base = OTHER; note = cEt 5-methylcytidine 3'-phosphorothioate
  modified_base 2..3: mod_base = OTHER; note = cEt thymidine 3'-phosphorothioate
  modified_base 4: mod_base = OTHER; note = 2'-deoxyguanosine 3'-phosphorothioate
  modified_base 5: mod_base = OTHER; note = 5-methyl-2'-deoxycytidine 3'-phosphorothioate
  modified_base 6: mod_base = OTHER; note = 2'-deoxythymidine 3'-phosphorothioate
  modified_base 7: mod_base = OTHER; note = 5-methyl-2'-deoxycytidine 3'-phosphorothioate
  modified_base 8: mod_base = OTHER; note = 2'-deoxyadenosine 3'-phosphorothioate
  modified_base 9: mod_base = OTHER; note = 2'-deoxyguanosine 3'-phosphorothioate
  modified_base 10: mod_base = OTHER; note = 5-methyl-2'-deoxycytidine 3'-phosphorothioate
  modified_base 11: mod_base = OTHER; note = 2'-deoxyadenosine 3'-phosphorothioate
  modified_base 12: mod_base = OTHER; note = 2'-deoxyguanosine 3'-phosphorothioate
  modified_base 13: mod_base = OTHER; note = 2'-deoxythymidine 3'-phosphorothioate
  modified_base 14: mod_base = OTHER; note = cEt guanosine 3'-phosphorothioate
  modified_base 15: mod_base = OTHER; note = cEt thymidine 3'-phosphorothioate
  modified_base 16: mod_base = OTHER; note = cEt 5-methylcytidine
cttgctcagcagtgtc

SEQ ID NO: 1001 - DNA, 16 bp, synthetic construct
  source 1..16: mol_type = other DNA
  modified_base 1: mod_base = OTHER; note = cEt adenosine 3'-phosphorothioate
  modified_base 2: mod_base = OTHER; note = cEt 5-methylcytidine 3'-phosphorothioate
  modified_base 3: mod_base = OTHER; note = cEt thymidine 3'-phosphorothioate
  modified_base 4: mod_base = OTHER; note = 2'-deoxythymidine 3'-phosphorothioate
  modified_base 5: mod_base = OTHER; note = 2'-deoxyguanosine 3'-phosphorothioate
  modified_base 6: mod_base = OTHER; note = 5-methyl-2'-deoxycytidine 3'-phosphorothioate
  modified_base 7: mod_base = OTHER; note = 2'-deoxythymidine 3'-phosphorothioate
  modified_base 8: mod_base = OTHER; note = 5-methyl-2'-deoxycytidine 3'-phosphorothioate
  modified_base 9: mod_base = OTHER; note = 2'-deoxyadenosine 3'-phosphorothioate
  modified_base 10: mod_base = OTHER; note = 2'-deoxyguanosine 3'-phosphorothioate
  modified_base 11: mod_base = OTHER; note = 5-methyl-2'-deoxycytidine 3'-phosphorothioate
  modified_base 12: mod_base = OTHER; note = 2'-deoxyadenosine 3'-phosphorothioate
  modified_base 13: mod_base = OTHER; note = 2'-deoxyguanosine 3'-phosphorothioate
  modified_base 14: mod_base = OTHER; note = cEt thymidine 3'-phosphorothioate
  modified_base 15: mod_base = OTHER; note = cEt guanosine 3'-phosphorothioate
  modified_base 16: mod_base = OTHER; note = cEt thymidine
acttgctcagcagtgt

SEQ ID NO: 1002 - DNA, 16 bp, synthetic construct
  source 1..16: mol_type = other DNA
  modified_base 1..2: mod_base = OTHER; note = cEt adenosine 3'-phosphorothioate
  modified_base 3: mod_base = OTHER; note = cEt 5-methylcytidine 3'-phosphorothioate
  modified_base 4..5: mod_base = OTHER; note = 2'-deoxythymidine 3'-phosphorothioate
  modified_base 6: mod_base = OTHER; note = 2'-deoxyguanosine 3'-phosphorothioate
  modified_base 7: mod_base = OTHER; note = 5-methyl-2'-deoxycytidine 3'-phosphorothioate
  modified_base 8: mod_base = OTHER; note = 2'-deoxythymidine 3'-phosphorothioate
  modified_base 9: mod_base = OTHER; note = 5-methyl-2'-deoxycytidine 3'-phosphorothioate
  modified_base 10: mod_base = OTHER; note = 2'-deoxyadenosine 3'-phosphorothioate
  modified_base 11: mod_base = OTHER; note = 2'-deoxyguanosine 3'-phosphorothioate
  modified_base 12: mod_base = OTHER; note = 5-methyl-2'-deoxycytidine 3'-phosphorothioate
  modified_base 13: mod_base = OTHER; note = 2'-deoxyadenosine 3'-phosphorothioate
  modified_base 14: mod_base = OTHER; note = cEt guanosine 3'-phosphorothioate
  modified_base 15: mod_base = OTHER; note = cEt thymidine 3'-phosphorothioate
  modified_base 16: mod_base = OTHER; note = cEt guanosine
aacttgctcagcagtg

SEQ ID NO: 1003 - DNA, 16 bp, synthetic construct
  source 1..16: mol_type = other DNA
  modified_base 1..3: mod_base = OTHER; note = cEt adenosine 3'-phosphorothioate
  modified_base 4: mod_base = OTHER; note = 5-methyl-2'-deoxycytidine 3'-phosphorothioate
  modified_base 5..6: mod_base = OTHER; note = 2'-deoxythymidine 3'-phosphorothioate
  modified_base 7: mod_base = OTHER; note = 2'-deoxyguanosine 3'-phosphorothioate
  modified_base 8: mod_base = OTHER; note = 5-methyl-2'-deoxycytidine 3'-phosphorothioate
  modified_base 9: mod_base = OTHER; note = 2'-deoxythymidine 3'-phosphorothioate
  modified_base 10: mod_base = OTHER; note = 5-methyl-2'-deoxycytidine 3'-phosphorothioate
  modified_base 11: mod_base = OTHER; note = 2'-deoxyadenosine 3'-phosphorothioate
  modified_base 12: mod_base = OTHER; note = 2'-deoxyguanosine 3'-phosphorothioate
  modified_base 13: mod_base = OTHER; note = 5-methyl-2'-deoxycytidine 3'-phosphorothioate
  modified_base 14: mod_base = OTHER; note = cEt adenosine 3'-phosphorothioate
  modified_base 15: mod_base = OTHER; note = cEt guanosine 3'-phosphorothioate
  modified_base 16: mod_base = OTHER; note = cEt thymidine
aaacttgctcagcagt

SEQ ID NO: 1004 - DNA, 16 bp, synthetic construct
  source 1..16: mol_type = other DNA
  modified_base 1..2: mod_base = OTHER; note = cEt 5-methylcytidine 3'-phosphorothioate
  modified_base 3: mod_base = OTHER; note = cEt adenosine 3'-phosphorothioate
  modified_base 4..5: mod_base = OTHER; note = 2'-deoxyadenosine 3'-phosphorothioate
  modified_base 6: mod_base = OTHER; note = 5-methyl-2'-deoxycytidine 3'-phosphorothioate
  modified_base 7..8: mod_base = OTHER; note = 2'-deoxythymidine 3'-phosphorothioate
  modified_base 9: mod_base = OTHER; note = 2'-deoxyguanosine 3'-phosphorothioate
  modified_base 10: mod_base = OTHER; note = 5-methyl-2'-deoxycytidine 3'-phosphorothioate
  modified_base 11: mod_base = OTHER; note = 2'-deoxythymidine 3'-phosphorothioate
  modified_base 12: mod_base = OTHER; note = 5-methyl-2'-deoxycytidine 3'-phosphorothioate
  modified_base 13: mod_base = OTHER; note = 2'-deoxyadenosine 3'-phosphorothioate
  modified_base 14: mod_base = OTHER; note = cEt guanosine 3'-phosphorothioate
  modified_base 15: mod_base = OTHER; note = cEt 5-methylcytidine 3'-phosphorothioate
  modified_base 16: mod_base = OTHER; note = cEt adenosine
ccaaacttgctcagca

SEQ ID NO: 1005 - DNA, 16 bp, synthetic construct
  source 1..16: mol_type = other DNA
  modified_base 1..3: mod_base = OTHER; note = cEt 5-methylcytidine 3'-phosphorothioate
  modified_base 4..6: mod_base = OTHER; note = 2'-deoxyadenosine 3'-phosphorothioate
  modified_base 7: mod_base = OTHER; note = 5-methyl-2'-deoxycytidine 3'-phosphorothioate
  modified_base 8..9: mod_base = OTHER; note = 2'-deoxythymidine 3'-phosphorothioate
  modified_base 10: mod_base = OTHER; note = 2'-deoxyguanosine 3'-phosphorothioate
  modified_base 11: mod_base = OTHER; note = 5-methyl-2'-deoxycytidine 3'-phosphorothioate
  modified_base 12: mod_base = OTHER; note = 2'-deoxythymidine 3'-phosphorothioate
  modified_base 13: mod_base = OTHER; note = 5-methyl-2'-deoxycytidine 3'-phosphorothioate
  modified_base 14: mod_base = OTHER; note = cEt adenosine 3'-phosphorothioate
  modified_base 15: mod_base = OTHER; note = cEt guanosine 3'-phosphorothioate
  modified_base 16: mod_base = OTHER; note = cEt 5-methylcytidine
cccaaacttgctcagc

SEQ ID NO: 1006 - DNA, 16 bp, synthetic construct
  source 1..16: mol_type = other DNA
  modified_base 1..3: mod_base = OTHER; note = cEt 5-methylcytidine 3'-phosphorothioate
  modified_base 4: mod_base = OTHER; note = 5-methyl-2'-deoxycytidine 3'-phosphorothioate
  modified_base 5..7: mod_base = OTHER; note = 2'-deoxyadenosine 3'-phosphorothioate
  modified_base 8: mod_base = OTHER; note = 5-methyl-2'-deoxycytidine 3'-phosphorothioate
  modified_base 9..10: mod_base = OTHER; note = 2'-deoxythymidine 3'-phosphorothioate
  modified_base 11: mod_base = OTHER; note = 2'-deoxyguanosine 3'-phosphorothioate
  modified_base 12: mod_base = OTHER; note = 5-methyl-2'-deoxycytidine 3'-phosphorothioate
  modified_base 13: mod_base = OTHER; note = 2'-deoxythymidine 3'-phosphorothioate
  modified_base 14: mod_base = OTHER; note = cEt 5-methylcytidine 3'-phosphorothioate
  modified_base 15: mod_base = OTHER; note = cEt adenosine 3'-phosphorothioate
  modified_base 16: mod_base = OTHER; note = cEt guanosine
ccccaaacttgctcag

SEQ ID NO: 1007 - DNA, 16 bp, synthetic construct
  source 1..16: mol_type = other DNA
  modified_base 1: mod_base = OTHER; note = cEt guanosine 3'-phosphorothioate
  modified_base 2: mod_base = OTHER; note = cEt 5-methylcytidine 3'-phosphorothioate
  modified_base 3: mod_base = OTHER; note = cEt thymidine 3'-phosphorothioate
  modified_base 4..7: mod_base = OTHER; note = 5-methyl-2'-deoxycytidine 3'-phosphorothioate
  modified_base 8..10: mod_base = OTHER; note = 2'-deoxyadenosine 3'-phosphorothioate
  modified_base 11: mod_base = OTHER; note = 5-methyl-2'-deoxycytidine 3'-phosphorothioate
  modified_base 12..13: mod_base = OTHER; note = 2'-deoxythymidine 3'-phosphorothioate
  modified_base 14: mod_base = OTHER; note = cEt guanosine 3'-phosphorothioate
  modified_base 15: mod_base = OTHER; note = cEt 5-methylcytidine 3'-phosphorothioate
  modified_base 16: mod_base = OTHER; note = cEt thymidine
gctccccaaacttgct

SEQ ID NO: 1008 - DNA, 16 bp, synthetic construct
  source 1..16: mol_type = other DNA
  modified_base 1: mod_base = OTHER; note = cEt 5-methylcytidine 3'-phosphorothioate
  modified_base 3: mod_base = OTHER; note = cEt 5-methylcytidine 3'-phosphorothioate
  modified_base 2: mod_base = OTHER; note = cEt guanosine 3'-phosphorothioate
  modified_base 4: mod_base = OTHER; note = 2'-deoxythymidine 3'-phosphorothioate
  modified_base 5..8: mod_base = OTHER; note = 5-methyl-2'-deoxycytidine 3'-phosphorothioate
  modified_base 9..11: mod_base = OTHER; note = 2'-deoxyadenosine 3'-phosphorothioate
  modified_base 12: mod_base = OTHER; note = 5-methyl-2'-deoxycytidine 3'-phosphorothioate
  modified_base 13: mod_base = OTHER; note = 2'-deoxythymidine 3'-phosphorothioate
  modified_base 14: mod_base = OTHER; note = cEt thymidine 3'-phosphorothioate
  modified_base 15: mod_base = OTHER; note = cEt guanosine 3'-phosphorothioate
  modified_base 16: mod_base = OTHER; note = cEt 5-methylcytidine
cgctccccaaacttgc

SEQ ID NO: 1009 - DNA, 16 bp, synthetic construct
  source 1..16: mol_type = other DNA
  modified_base 1..2: mod_base = OTHER; note = cEt 5-methylcytidine 3'-phosphorothioate
  modified_base 3: mod_base = OTHER; note = cEt guanosine 3'-phosphorothioate
  modified_base 4: mod_base = OTHER; note = 5-methyl-2'-deoxycytidine 3'-phosphorothioate
  modified_base 5: mod_base = OTHER; note = 2'-deoxythymidine 3'-phosphorothioate
  modified_base 6..9: mod_base = OTHER; note = 5-methyl-2'-deoxycytidine 3'-phosphorothioate
  modified_base 10..12: mod_base = OTHER; note = 2'-deoxyadenosine 3'-phosphorothioate
  modified_base 13: mod_base = OTHER; note = 5-methyl-2'-deoxycytidine 3'-phosphorothioate
  modified_base 14..15: mod_base = OTHER; note = cEt thymidine 3'-phosphorothioate
  modified_base 16: mod_base = OTHER; note = cEt guanosine
ccgctccccaaacttg

SEQ ID NO: 1010 - DNA, 16 bp, synthetic construct
  source 1..16: mol_type = other DNA
  modified_base 1: mod_base = OTHER; note = cEt thymidine 3'-phosphorothioate
  modified_base 2..3: mod_base = OTHER; note = cEt 5-methylcytidine 3'-phosphorothioate
  modified_base 4: mod_base = OTHER; note = 2'-deoxyguanosine 3'-phosphorothioate
  modified_base 5: mod_base = OTHER; note = 5-methyl-2'-deoxycytidine 3'-phosphorothioate
  modified_base 6: mod_base = OTHER; note = 2'-deoxythymidine 3'-phosphorothioate
  modified_base 7..10: mod_base = OTHER; note = 5-methyl-2'-deoxycytidine 3'-phosphorothioate
  modified_base 11..13: mod_base = OTHER; note = 2'-deoxyadenosine 3'-phosphorothioate
  modified_base 14: mod_base = OTHER; note = cEt 5-methylcytidine 3'-phosphorothioate
  modified_base 15: mod_base = OTHER; note = cEt thymidine 3'-phosphorothioate
  modified_base 16: mod_base = OTHER; note = cEt thymidine
tccgctccccaaactt

SEQ ID NO: 1011 - DNA, 16 bp, synthetic construct
  source 1..16: mol_type = other DNA
  modified_base 1: mod_base = OTHER; note = cEt adenosine 3'-phosphorothioate
  modified_base 2: mod_base = OTHER; note = cEt thymidine 3'-phosphorothioate
  modified_base 3: mod_base = OTHER; note = cEt 5-methylcytidine 3'-phosphorothioate
  modified_base 4: mod_base = OTHER; note = 5-methyl-2'-deoxycytidine 3'-phosphorothioate
  modified_base 5: mod_base = OTHER; note = 2'-deoxyguanosine 3'-phosphorothioate
  modified_base 6: mod_base = OTHER; note = 5-methyl-2'-deoxycytidine 3'-phosphorothioate
  modified_base 7: mod_base = OTHER; note = 2'-deoxythymidine 3'-phosphorothioate
  modified_base 8..11: mod_base = OTHER; note = 5-methyl-2'-deoxycytidine 3'-phosphorothioate
  modified_base 12..13: mod_base = OTHER; note = 2'-deoxyadenosine 3'-phosphorothioate
  modified_base 14: mod_base = OTHER; note = cEt adenosine 3'-phosphorothioate
  modified_base 15: mod_base = OTHER; note = cEt 5-methylcytidine 3'-phosphorothioate
  modified_base 16: mod_base = OTHER; note = cEt thymidine
atccgctccccaaact

SEQ ID NO: 1012 - DNA, 16 bp, synthetic construct
  source 1..16: mol_type = other DNA
  modified_base 1..2: mod_base = OTHER; note = cEt adenosine 3'-phosphorothioate
  modified_base 3: mod_base = OTHER; note = cEt thymidine 3'-phosphorothioate
  modified_base 4..5: mod_base = OTHER; note = 5-methyl-2'-deoxycytidine 3'-phosphorothioate
  modified_base 6: mod_base = OTHER; note = 2'-deoxyguanosine 3'-phosphorothioate
  modified_base 7: mod_base = OTHER; note = 5-methyl-2'-deoxycytidine 3'-phosphorothioate
  modified_base 8: mod_base = OTHER; note = 2'-deoxythymidine 3'-phosphorothioate
  modified_base 9..12: mod_base = OTHER; note = 5-methyl-2'-deoxycytidine 3'-phosphorothioate
  modified_base 13: mod_base = OTHER; note = 2'-deoxyadenosine 3'-phosphorothioate
  modified_base 14..15: mod_base = OTHER; note = cEt adenosine 3'-phosphorothioate
  modified_base 16: mod_base = OTHER; note = cEt 5-methylcytidine
aatccgctccccaaac

SEQ ID NO: 1013 - DNA, 16 bp, synthetic construct
  source 1..16: mol_type = other DNA
  modified_base 1: mod_base = OTHER; note = cEt guanosine 3'-phosphorothioate
  modified_base 2..3: mod_base = OTHER; note = cEt adenosine 3'-phosphorothioate
  modified_base 4: mod_base = OTHER; note = 2'-deoxythymidine 3'-phosphorothioate
  modified_base 5..6: mod_base = OTHER; note = 5-methyl-2'-deoxycytidine 3'-phosphorothioate
  modified_base 7: mod_base = OTHER; note = 2'-deoxyguanosine 3'-phosphorothioate
  modified_base 8: mod_base = OTHER; note = 5-methyl-2'-deoxycytidine 3'-phosphorothioate
  modified_base 9: mod_base = OTHER; note = 2'-deoxythymidine 3'-phosphorothioate
  modified_base 10..13: mod_base = OTHER; note = 5-methyl-2'-deoxycytidine 3'-phosphorothioate
  modified_base 14..15: mod_base = OTHER; note = cEt adenosine 3'-phosphorothioate
  modified_base 16: mod_base = OTHER; note = cEt adenosine
gaatccgctccccaaa

SEQ ID NO: 1014 - DNA, 16 bp, synthetic construct
  source 1..16: mol_type = other DNA
  modified_base 1..2: mod_base = OTHER; note = cEt guanosine 3'-phosphorothioate
  modified_base 3: mod_base = OTHER; note = cEt adenosine 3'-phosphorothioate
  modified_base 4: mod_base = OTHER; note = 2'-deoxyadenosine 3'-phosphorothioate
  modified_base 5: mod_base = OTHER; note = 2'-deoxythymidine 3'-phosphorothioate
  modified_base 6..7: mod_base = OTHER; note = 5-methyl-2'-deoxycytidine 3'-phosphorothioate
  modified_base 8: mod_base = OTHER; note = 2'-deoxyguanosine 3'-phosphorothioate
  modified_base 9: mod_base = OTHER; note = 5-methyl-2'-deoxycytidine 3'-phosphorothioate
  modified_base 10: mod_base = OTHER; note = 2'-deoxythymidine 3'-phosphorothioate
  modified_base 11..13: mod_base = OTHER; note = 5-methyl-2'-deoxycytidine 3'-phosphorothioate
  modified_base 14: mod_base = OTHER; note = cEt 5-methylcytidine 3'-phosphorothioate
  modified_base 15: mod_base = OTHER; note = cEt adenosine 3'-phosphorothioate
  modified_base 16: mod_base = OTHER; note = cEt adenosine
ggaatccgctccccaa

SEQ ID NO: 1015 - DNA, 16 bp, synthetic construct
  source 1..16: mol_type = other DNA
  modified_base 1: mod_base = OTHER; note = cEt 5-methylcytidine 3'-phosphorothioate
  modified_base 2..3: mod_base = OTHER; note = cEt guanosine 3'-phosphorothioate
  modified_base 4..5: mod_base = OTHER; note = 2'-deoxyadenosine 3'-phosphorothioate
  modified_base 6: mod_base = OTHER; note = 2'-deoxythymidine 3'-phosphorothioate
  modified_base 7..8: mod_base = OTHER; note = 5-methyl-2'-deoxycytidine 3'-phosphorothioate
  modified_base 9: mod_base = OTHER; note = 2'-deoxyguanosine 3'-phosphorothioate
  modified_base 10: mod_base = OTHER; note = 5-methyl-2'-deoxycytidine 3'-phosphorothioate
  modified_base 11: mod_base = OTHER; note = 2'-deoxythymidine 3'-phosphorothioate
  modified_base 12..13: mod_base = OTHER; note = 5-methyl-2'-deoxycytidine 3'-phosphorothioate
  modified_base 14..15: mod_base = OTHER; note = cEt 5-methylcytidine 3'-phosphorothioate
  modified_base 16: mod_base = OTHER; note = cEt adenosine
cggaatccgctcccca

SEQ ID NO: 1016 - DNA, 16 bp, synthetic construct
  source 1..16: mol_type = other DNA
  modified_base 1..2: mod_base = OTHER; note = cEt 5-methylcytidine 3'-phosphorothioate
  modified_base 3: mod_base = OTHER; note = cEt guanosine 3'-phosphorothioate
  modified_base 4: mod_base = OTHER; note = 2'-deoxyguanosine 3'-phosphorothioate
  modified_base 5..6: mod_base = OTHER; note = 2'-deoxyadenosine 3'-phosphorothioate
  modified_base 7: mod_base = OTHER; note = 2'-deoxythymidine 3'-phosphorothioate
  modified_base 8..9: mod_base = OTHER; note = 5-methyl-2'-deoxycytidine 3'-phosphorothioate
  modified_base 10: mod_base = OTHER; note = 2'-deoxyguanosine 3'-phosphorothioate
  modified_base 11: mod_base = OTHER; note = 5-methyl-2'-deoxycytidine 3'-phosphorothioate
  modified_base 13: mod_base = OTHER; note = 5-methyl-2'-deoxycytidine 3'-phosphorothioate
  modified_base 12: mod_base = OTHER; note = 2'-deoxythymidine 3'-phosphorothioate
  modified_base 14..15: mod_base = OTHER; note = cEt 5-methylcytidine 3'-phosphorothioate
  modified_base 16: mod_base = OTHER; note = cEt 5-methylcytidine
ccggaatccgctcccc

SEQ ID NO: 1017 - DNA, 16 bp, synthetic construct
  source 1..16: mol_type = other DNA
  modified_base 1: mod_base = OTHER; note = cEt guanosine 3'-phosphorothioate
  modified_base 2..3: mod_base = OTHER; note = cEt 5-methylcytidine 3'-phosphorothioate
  modified_base 4..5: mod_base = OTHER; note = 2'-deoxyguanosine 3'-phosphorothioate
  modified_base 6..7: mod_base = OTHER; note = 2'-deoxyadenosine 3'-phosphorothioate
  modified_base 8: mod_base = OTHER; note = 2'-deoxythymidine 3'-phosphorothioate
  modified_base 9..10: mod_base = OTHER; note = 5-methyl-2'-deoxycytidine 3'-phosphorothioate
  modified_base 11: mod_base = OTHER; note = 2'-deoxyguanosine 3'-phosphorothioate
  modified_base 12: mod_base = OTHER; note = 5-methyl-2'-deoxycytidine 3'-phosphorothioate
  modified_base 13: mod_base = OTHER; note = 2'-deoxythymidine 3'-phosphorothioate
  modified_base 14..15: mod_base = OTHER; note = cEt 5-methylcytidine 3'-phosphorothioate
  modified_base 16: mod_base = OTHER; note = cEt 5-methylcytidine
gccggaatccgctccc

SEQ ID NO: 1018 - DNA, 16 bp, synthetic construct
  source 1..16: mol_type = other DNA
  modified_base 1: mod_base = OTHER; note = cEt adenosine 3'-phosphorothioate
  modified_base 3: mod_base = OTHER; note = cEt adenosine 3'-phosphorothioate
  modified_base 2: mod_base = OTHER; note = cEt guanosine 3'-phosphorothioate
  modified_base 4: mod_base = OTHER; note = 2'-deoxyadenosine 3'-phosphorothioate
  modified_base 5: mod_base = OTHER; note = 2'-deoxyguanosine 3'-phosphorothioate
  modified_base 6: mod_base = OTHER; note = 5-methyl-2'-deoxycytidine 3'-phosphorothioate
  modified_base 7: mod_base = OTHER; note = 2'-deoxyguanosine 3'-phosphorothioate
  modified_base 8: mod_base = OTHER; note = 5-methyl-2'-deoxycytidine 3'-phosphorothioate
  modified_base 9: mod_base = OTHER; note = 2'-deoxyguanosine 3'-phosphorothioate
  modified_base 10..11: mod_base = OTHER; note = 5-methyl-2'-deoxycytidine 3'-phosphorothioate
  modified_base 12: mod_base = OTHER; note = 2'-deoxyadenosine 3'-phosphorothioate
  modified_base 13: mod_base = OTHER; note = 2'-deoxythymidine 3'-phosphorothioate
  modified_base 14: mod_base = OTHER; note = cEt 5-methylcytidine 3'-phosphorothioate
  modified_base 15: mod_base = OTHER; note = cEt thymidine 3'-phosphorothioate
  modified_base 16: mod_base = OTHER; note = cEt 5-methylcytidine
agaagcgcgccatctc

SEQ ID NO: 1019 - DNA, 16 bp, synthetic construct
  source 1..16: mol_type = other DNA
  modified_base 1: mod_base = OTHER; note = cEt thymidine 3'-phosphorothioate
  modified_base 2: mod_base = OTHER; note = cEt adenosine 3'-phosphorothioate
  modified_base 3: mod_base = OTHER; note = cEt guanosine 3'-phosphorothioate
  modified_base 4..5: mod_base = OTHER; note = 2'-deoxyadenosine 3'-phosphorothioate
  modified_base 6: mod_base = OTHER; note = 2'-deoxyguanosine 3'-phosphorothioate
  modified_base 7: mod_base = OTHER; note = 5-methyl-2'-deoxycytidine 3'-phosphorothioate
  modified_base 8: mod_base = OTHER; note = 2'-deoxyguanosine 3'-phosphorothioate
  modified_base 9: mod_base = OTHER; note = 5-methyl-2'-deoxycytidine 3'-phosphorothioate
  modified_base 10: mod_base = OTHER; note = 2'-deoxyguanosine 3'-phosphorothioate
  modified_base 11..12: mod_base = OTHER; note = 5-methyl-2'-deoxycytidine 3'-phosphorothioate
  modified_base 13: mod_base = OTHER; note = 2'-deoxyadenosine 3'-phosphorothioate
  modified_base 14: mod_base = OTHER; note = cEt thymidine 3'-phosphorothioate
  modified_base 15: mod_base = OTHER; note = cEt 5-methylcytidine 3'-phosphorothioate
  modified_base 16: mod_base = OTHER; note = cEt thymidine
tagaagcgcgccatct

SEQ ID NO: 1020 - DNA, 16 bp, synthetic construct
  source 1..16: mol_type = other DNA
  modified_base 1: mod_base = OTHER; note = cEt guanosine 3'-phosphorothioate
  modified_base 2: mod_base = OTHER; note = cEt thymidine 3'-phosphorothioate
  modified_base 3: mod_base = OTHER; note = cEt adenosine 3'-phosphorothioate
  modified_base 4: mod_base = OTHER; note = 2'-deoxyguanosine 3'-phosphorothioate
  modified_base 5..6: mod_base = OTHER; note = 2'-deoxyadenosine 3'-phosphorothioate
  modified_base 7: mod_base = OTHER; note = 2'-deoxyguanosine 3'-phosphorothioate
  modified_base 8: mod_base = OTHER; note = 5-methyl-2'-deoxycytidine 3'-phosphorothioate
  modified_base 9: mod_base = OTHER; note = 2'-deoxyguanosine 3'-phosphorothioate
  modified_base 10: mod_base = OTHER; note = 5-methyl-2'-deoxycytidine 3'-phosphorothioate
  modified_base 11: mod_base = OTHER; note = 2'-deoxyguanosine 3'-phosphorothioate
  modified_base 12..13: mod_base = OTHER; note = 5-methyl-2'-deoxycytidine 3'-phosphorothioate
  modified_base 14: mod_base = OTHER; note = cEt adenosine 3'-phosphorothioate
  modified_base 15: mod_base = OTHER; note = cEt thymidine 3'-phosphorothioate
  modified_base 16: mod_base = OTHER; note = cEt 5-methylcytidine
gtagaagcgcgccatc

SEQ ID NO: 1021 - DNA, 16 bp, synthetic construct
  source 1..16: mol_type = other DNA
  modified_base 1..2: mod_base = OTHER; note = cEt guanosine 3'-phosphorothioate
  modified_base 3: mod_base = OTHER; note = cEt thymidine 3'-phosphorothioate
  modified_base 4: mod_base = OTHER; note = 2'-deoxyadenosine 3'-phosphorothioate
  modified_base 5: mod_base = OTHER; note = 2'-deoxyguanosine 3'-phosphorothioate
  modified_base 6..7: mod_base = OTHER; note = 2'-deoxyadenosine 3'-phosphorothioate
  modified_base 8: mod_base = OTHER; note = 2'-deoxyguanosine 3'-phosphorothioate
  modified_base 9: mod_base = OTHER; note = 5-methyl-2'-deoxycytidine 3'-phosphorothioate
  modified_base 10: mod_base = OTHER; note = 2'-deoxyguanosine 3'-phosphorothioate
  modified_base 11: mod_base = OTHER; note = 5-methyl-2'-deoxycytidine 3'-phosphorothioate
  modified_base 12: mod_base = OTHER; note = 2'-deoxyguanosine 3'-phosphorothioate
  modified_base 13: mod_base = OTHER; note = 5-methyl-2'-deoxycytidine 3'-phosphorothioate
  modified_base 14: mod_base = OTHER; note = cEt 5-methylcytidine 3'-phosphorothioate
  modified_base 15: mod_base = OTHER; note = cEt adenosine 3'-phosphorothioate
  modified_base 16: mod_base = OTHER; note = cEt thymidine
ggtagaagcgcgccat

SEQ ID NO: 1022 - DNA, 16 bp, synthetic construct
  source 1..16: mol_type = other DNA
  modified_base 1: mod_base = OTHER; note = cEt adenosine 3'-phosphorothioate
  modified_base 2..3: mod_base = OTHER; note = cEt guanosine 3'-phosphorothioate
  modified_base 4: mod_base = OTHER; note = 2'-deoxythymidine 3'-phosphorothioate
  modified_base 5: mod_base = OTHER; note = 2'-deoxyadenosine 3'-phosphorothioate
  modified_base 6: mod_base = OTHER; note = 2'-deoxyguanosine 3'-phosphorothioate
  modified_base 7..8: mod_base = OTHER; note = 2'-deoxyadenosine 3'-phosphorothioate
  modified_base 9: mod_base = OTHER; note = 2'-deoxyguanosine 3'-phosphorothioate
  modified_base 10: mod_base = OTHER; note = 5-methyl-2'-deoxycytidine 3'-phosphorothioate
  modified_base 11: mod_base = OTHER; note = 2'-deoxyguanosine 3'-phosphorothioate
  modified_base 12: mod_base = OTHER; note = 5-methyl-2'-deoxycytidine 3'-phosphorothioate
  modified_base 13: mod_base = OTHER; note = 2'-deoxyguanosine 3'-phosphorothioate
  modified_base 14..15: mod_base = OTHER; note = cEt 5-methylcytidine 3'-phosphorothioate
  modified_base 16: mod_base = OTHER; note = cEt adenosine
aggtagaagcgcgcca

SEQ ID NO: 1023 - DNA, 16 bp, synthetic construct
  source 1..16: mol_type = other DNA
  modified_base 1: mod_base = OTHER; note = cEt 5-methylcytidine 3'-phosphorothioate
  modified_base 2: mod_base = OTHER; note = cEt adenosine 3'-phosphorothioate
  modified_base 3: mod_base = OTHER; note = cEt guanosine 3'-phosphorothioate
  modified_base 4: mod_base = OTHER; note = 2'-deoxyguanosine 3'-phosphorothioate
  modified_base 5: mod_base = OTHER; note = 2'-deoxythymidine 3'-phosphorothioate
  modified_base 6: mod_base = OTHER; note = 2'-deoxyadenosine 3'-phosphorothioate
  modified_base 7: mod_base = OTHER; note = 2'-deoxyguanosine 3'-phosphorothioate
  modified_base 8..9: mod_base = OTHER; note = 2'-deoxyadenosine 3'-phosphorothioate
  modified_base 10: mod_base = OTHER; note = 2'-deoxyguanosine 3'-phosphorothioate
  modified_base 11: mod_base = OTHER; note = 5-methyl-2'-deoxycytidine 3'-phosphorothioate
  modified_base 12: mod_base = OTHER; note = 2'-deoxyguanosine 3'-phosphorothioate
  modified_base 13: mod_base = OTHER; note = 5-methyl-2'-deoxycytidine 3'-phosphorothioate
  modified_base 14: mod_base = OTHER; note = cEt guanosine 3'-phosphorothioate
  modified_base 15: mod_base = OTHER; note = cEt 5-methylcytidine 3'-phosphorothioate
  modified_base 16: mod_base = OTHER; note = cEt 5-methylcytidine
caggtagaagcgcgcc

SEQ ID NO: 1024 - DNA, 16 bp, synthetic construct
  source 1..16: mol_type = other DNA
  modified_base 1..2: mod_base = OTHER; note = cEt 5-methylcytidine 3'-phosphorothioate
  modified_base 3: mod_base = OTHER; note = cEt adenosine 3'-phosphorothioate
  modified_base 4..5: mod_base = OTHER; note = 2'-deoxyguanosine 3'-phosphorothioate
  modified_base 6: mod_base = OTHER; note = 2'-deoxythymidine 3'-phosphorothioate
  modified_base 7: mod_base = OTHER; note = 2'-deoxyadenosine 3'-phosphorothioate
  modified_base 8: mod_base = OTHER; note = 2'-deoxyguanosine 3'-phosphorothioate
  modified_base 9..10: mod_base = OTHER; note = 2'-deoxyadenosine 3'-phosphorothioate
  modified_base 11: mod_base = OTHER; note = 2'-deoxyguanosine 3'-phosphorothioate
  modified_base 12: mod_base = OTHER; note = 5-methyl-2'-deoxycytidine 3'-phosphorothioate
  modified_base 13: mod_base = OTHER; note = 2'-deoxyguanosine 3'-phosphorothioate
  modified_base 14: mod_base = OTHER; note = cEt 5-methylcytidine 3'-phosphorothioate
  modified_base 15: mod_base = OTHER; note = cEt guanosine 3'-phosphorothioate
  modified_base 16: mod_base = OTHER; note = cEt 5-methylcytidine
ccaggtagaagcgcgc

SEQ ID NO: 1025 - DNA, 16 bp, synthetic construct
  source 1..16: mol_type = other DNA
  modified_base 1: mod_base = OTHER; note = cEt guanosine 3'-phosphorothioate
  modified_base 2..3: mod_base = OTHER; note = cEt 5-methylcytidine 3'-phosphorothioate
  modified_base 4: mod_base = OTHER; note = 2'-deoxyadenosine 3'-phosphorothioate
  modified_base 5..6: mod_base = OTHER; note = 2'-deoxyguanosine 3'-phosphorothioate
  modified_base 7: mod_base = OTHER; note = 2'-deoxythymidine 3'-phosphorothioate
  modified_base 8: mod_base = OTHER; note = 2'-deoxyadenosine 3'-phosphorothioate
  modified_base 9: mod_base = OTHER; note = 2'-deoxyguanosine 3'-phosphorothioate
  modified_base 10..11: mod_base = OTHER; note = 2'-deoxyadenosine 3'-phosphorothioate
  modified_base 12: mod_base = OTHER; note = 2'-deoxyguanosine 3'-phosphorothioate
  modified_base 13: mod_base = OTHER; note = 5-methyl-2'-deoxycytidine 3'-phosphorothioate
  modified_base 14: mod_base = OTHER; note = cEt guanosine 3'-phosphorothioate
  modified_base 15: mod_base = OTHER; note = cEt 5-methylcytidine 3'-phosphorothioate
  modified_base 16: mod_base = OTHER; note = cEt guanosine
gccaggtagaagcgcg

SEQ ID NO: 1026 - DNA, 16 bp, synthetic construct
  source 1..16: mol_type = other DNA
  modified_base 1: mod_base = OTHER; note = cEt 5-methylcytidine 3'-phosphorothioate
  modified_base 2: mod_base = OTHER; note = cEt guanosine 3'-phosphorothioate
  modified_base 3: mod_base = OTHER; note = cEt 5-methylcytidine 3'-phosphorothioate
  modified_base 4: mod_base = OTHER; note = 5-methyl-2'-deoxycytidine 3'-phosphorothioate
  modified_base 5: mod_base = OTHER; note = 2'-deoxyadenosine 3'-phosphorothioate
  modified_base 6..7: mod_base = OTHER; note = 2'-deoxyguanosine 3'-phosphorothioate
  modified_base 8: mod_base = OTHER; note = 2'-deoxythymidine 3'-phosphorothioate
  modified_base 9: mod_base = OTHER; note = 2'-deoxyadenosine 3'-phosphorothioate
  modified_base 10: mod_base = OTHER; note = 2'-deoxyguanosine 3'-phosphorothioate
  modified_base 11..12: mod_base = OTHER; note = 2'-deoxyadenosine 3'-phosphorothioate
  modified_base 13: mod_base = OTHER; note = 2'-deoxyguanosine 3'-phosphorothioate
  modified_base 14: mod_base = OTHER; note = cEt 5-methylcytidine 3'-phosphorothioate
  modified_base 15: mod_base = OTHER; note = cEt guanosine 3'-phosphorothioate
  modified_base 16: mod_base = OTHER; note = cEt 5-methylcytidine
cgccaggtagaagcgc

SEQ ID NO: 1027 - DNA, 16 bp, synthetic construct
  source 1..16: mol_type = other DNA
  modified_base 1..2: mod_base = OTHER; note = cEt 5-methylcytidine 3'-phosphorothioate
  modified_base 3: mod_base = OTHER; note = cEt guanosine 3'-phosphorothioate
  modified_base 4..5: mod_base = OTHER; note = 5-methyl-2'-deoxycytidine 3'-phosphorothioate
  modified_base 6: mod_base = OTHER; note = 2'-deoxyadenosine 3'-phosphorothioate
  modified_base 7..8: mod_base = OTHER; note = 2'-deoxyguanosine 3'-phosphorothioate
  modified_base 9: mod_base = OTHER; note = 2'-deoxythymidine 3'-phosphorothioate
  modified_base 10: mod_base = OTHER; note = 2'-deoxyadenosine 3'-phosphorothioate
  modified_base 11: mod_base = OTHER; note = 2'-deoxyguanosine 3'-phosphorothioate
  modified_base 12..13: mod_base = OTHER; note = 2'-deoxyadenosine 3'-phosphorothioate
  modified_base 14: mod_base = OTHER; note = cEt guanosine 3'-phosphorothioate
  modified_base 15: mod_base = OTHER; note = cEt 5-methylcytidine 3'-phosphorothioate
  modified_base 16: mod_base = OTHER; note = cEt guanosine
ccgccaggtagaagcg

SEQ ID NO: 1028 - DNA, 16 bp, synthetic construct
  source 1..16: mol_type = other DNA
  modified_base 1: mod_base = OTHER; note = cEt thymidine 3'-phosphorothioate
  modified_base 2..3: mod_base = OTHER; note = cEt 5-methylcytidine 3'-phosphorothioate
  modified_base 4: mod_base = OTHER; note = 2'-deoxyguanosine 3'-phosphorothioate
  modified_base 5..6: mod_base = OTHER; note = 5-methyl-2'-deoxycytidine 3'-phosphorothioate
  modified_base 7: mod_base = OTHER; note = 2'-deoxyadenosine 3'-phosphorothioate
  modified_base 8..9: mod_base = OTHER; note = 2'-deoxyguanosine 3'-phosphorothioate
  modified_base 10: mod_base = OTHER; note = 2'-deoxythymidine 3'-phosphorothioate
  modified_base 11: mod_base = OTHER; note = 2'-deoxyadenosine 3'-phosphorothioate
  modified_base 12: mod_base = OTHER; note = 2'-deoxyguanosine 3'-phosphorothioate
  modified_base 13: mod_base = OTHER; note = 2'-deoxyadenosine 3'-phosphorothioate
  modified_base 14: mod_base = OTHER; note = cEt adenosine 3'-phosphorothioate
  modified_base 15: mod_base = OTHER; note = cEt guanosine 3'-phosphorothioate
  modified_base 16: mod_base = OTHER; note = cEt 5-methylcytidine
tccgccaggtagaagc

SEQ ID NO: 1029 - DNA, 16 bp, synthetic construct
  source 1..16: mol_type = other DNA
  modified_base 1: mod_base = OTHER; note = cEt thymidine 3'-phosphorothioate
  modified_base 2: mod_base = OTHER; note = cEt guanosine 3'-phosphorothioate
  modified_base 3: mod_base = OTHER; note = cEt adenosine 3'-phosphorothioate
  modified_base 4: mod_base = OTHER; note = 5-methyl-2'-deoxycytidine 3'-phosphorothioate
  modified_base 5..6: mod_base = OTHER; note = 2'-deoxyadenosine 3'-phosphorothioate
  modified_base 7: mod_base = OTHER; note = 2'-deoxythymidine 3'-phosphorothioate
  modified_base 8: mod_base = OTHER; note = 5-methyl-2'-deoxycytidine 3'-phosphorothioate
  modified_base 9: mod_base = OTHER; note = 2'-deoxythymidine 3'-phosphorothioate
  modified_base 10..11: mod_base = OTHER; note = 5-methyl-2'-deoxycytidine 3'-phosphorothioate
  modified_base 12: mod_base = OTHER; note = 2'-deoxyguanosine 3'-phosphorothioate
  modified_base 13: mod_base = OTHER; note = 5-methyl-2'-deoxycytidine 3'-phosphorothioate
  modified_base 14: mod_base = OTHER; note = cEt 5-methylcytidine 3'-phosphorothioate
  modified_base 15: mod_base = OTHER; note = cEt adenosine 3'-phosphorothioate
  modified_base 16: mod_base = OTHER; note = cEt guanosine
tgacaatctccgccag

SEQ ID NO: 1030 - DNA, 16 bp, synthetic construct
  source 1..16: mol_type = other DNA
  modified_base 1: mod_base = OTHER; note = cEt adenosine 3'-phosphorothioate
  modified_base 2: mod_base = OTHER; note = cEt thymidine 3'-phosphorothioate
  modified_base 3: mod_base = OTHER; note = cEt guanosine 3'-phosphorothioate
  modified_base 4: mod_base = OTHER; note = 2'-deoxyadenosine 3'-phosphorothioate
  modified_base 5: mod_base = OTHER; note = 5-methyl-2'-deoxycytidine 3'-phosphorothioate
  modified_base 6..7: mod_base = OTHER; note = 2'-deoxyadenosine 3'-phosphorothioate
  modified_base 8: mod_base = OTHER; note = 2'-deoxythymidine 3'-phosphorothioate
  modified_base 9: mod_base = OTHER; note = 5-methyl-2'-deoxycytidine 3'-phosphorothioate
  modified_base 10: mod_base = OTHER; note = 2'-deoxythymidine 3'-phosphorothioate
  modified_base 11..12: mod_base = OTHER; note = 5-methyl-2'-deoxycytidine 3'-phosphorothioate
  modified_base 13: mod_base = OTHER; note = 2'-deoxyguanosine 3'-phosphorothioate
  modified_base 14..15: mod_base = OTHER; note = cEt 5-methylcytidine 3'-phosphorothioate
  modified_base 16: mod_base = OTHER; note = cEt adenosine
atgacaatctccgcca

SEQ ID NO: 1031 - DNA, 16 bp, synthetic construct
  source 1..16: mol_type = other DNA
  modified_base 1: mod_base = OTHER; note = cEt 5-methylcytidine 3'-phosphorothioate
  modified_base 2: mod_base = OTHER; note = cEt adenosine 3'-phosphorothioate
  modified_base 3: mod_base = OTHER; note = cEt thymidine 3'-phosphorothioate
  modified_base 4: mod_base = OTHER; note = 2'-deoxyguanosine 3'-phosphorothioate
  modified_base 5: mod_base = OTHER; note = 2'-deoxyadenosine 3'-phosphorothioate
  modified_base 6: mod_base = OTHER; note = 5-methyl-2'-deoxycytidine 3'-phosphorothioate
  modified_base 7..8: mod_base = OTHER; note = 2'-deoxyadenosine 3'-phosphorothioate
  modified_base 9: mod_base = OTHER; note = 2'-deoxythymidine 3'-phosphorothioate
  modified_base 10: mod_base = OTHER; note = 5-methyl-2'-deoxycytidine 3'-phosphorothioate
  modified_base 11: mod_base = OTHER; note = 2'-deoxythymidine 3'-phosphorothioate
  modified_base 12..13: mod_base = OTHER; note = 5-methyl-2'-deoxycytidine 3'-phosphorothioate
  modified_base 14: mod_base = OTHER; note = cEt guanosine 3'-phosphorothioate
  modified_base 15: mod_base = OTHER; note = cEt 5-methylcytidine 3'-phosphorothioate
  modified_base 16: mod_base = OTHER; note = cEt 5-methylcytidine
catgacaatctccgcc

SEQ ID NO: 1032 - DNA, 16 bp, synthetic construct
  source 1..16: mol_type = other DNA
  modified_base 1..2: mod_base = OTHER; note = cEt 5-methylcytidine 3'-phosphorothioate
  modified_base 3: mod_base = OTHER; note = cEt adenosine 3'-phosphorothioate
  modified_base 4: mod_base = OTHER; note = 2'-deoxythymidine 3'-phosphorothioate
  modified_base 5: mod_base = OTHER; note = 2'-deoxyguanosine 3'-phosphorothioate
  modified_base 6: mod_base = OTHER; note = 2'-deoxyadenosine 3'-phosphorothioate
  modified_base 7: mod_base = OTHER; note = 5-methyl-2'-deoxycytidine 3'-phosphorothioate
  modified_base 8..9: mod_base = OTHER; note = 2'-deoxyadenosine 3'-phosphorothioate
  modified_base 10: mod_base = OTHER; note = 2'-deoxythymidine 3'-phosphorothioate
  modified_base 11: mod_base = OTHER; note = 5-methyl-2'-deoxycytidine 3'-phosphorothioate
  modified_base 12: mod_base = OTHER; note = 2'-deoxythymidine 3'-phosphorothioate
  modified_base 13: mod_base = OTHER; note = 5-methyl-2'-deoxycytidine 3'-phosphorothioate
  modified_base 14: mod_base = OTHER; note = cEt 5-methylcytidine 3'-phosphorothioate
  modified_base 15: mod_base = OTHER; note = cEt guanosine 3'-phosphorothioate
  modified_base 16: mod_base = OTHER; note = cEt 5-methylcytidine
ccatgacaatctccgc

SEQ ID NO: 1033 - DNA, 16 bp, synthetic construct
  source 1..16: mol_type = other DNA
  modified_base 1: mod_base = OTHER; note = cEt guanosine 3'-phosphorothioate
  modified_base 2..3: mod_base = OTHER; note = cEt 5-methylcytidine 3'-phosphorothioate
  modified_base 4: mod_base = OTHER; note = 2'-deoxyadenosine 3'-phosphorothioate
  modified_base 5: mod_base = OTHER; note = 2'-deoxythymidine 3'-phosphorothioate
  modified_base 6: mod_base = OTHER; note = 2'-deoxyguanosine 3'-phosphorothioate
  modified_base 7: mod_base = OTHER; note = 2'-deoxyadenosine 3'-phosphorothioate
  modified_base 8: mod_base = OTHER; note = 5-methyl-2'-deoxycytidine 3'-phosphorothioate
  modified_base 9..10: mod_base = OTHER; note = 2'-deoxyadenosine 3'-phosphorothioate
  modified_base 11: mod_base = OTHER; note = 2'-deoxythymidine 3'-phosphorothioate
  modified_base 12: mod_base = OTHER; note = 5-methyl-2'-deoxycytidine 3'-phosphorothioate
  modified_base 13: mod_base = OTHER; note = 2'-deoxythymidine 3'-phosphorothioate
  modified_base 14..15: mod_base = OTHER; note = cEt 5-methylcytidine 3'-phosphorothioate
  modified_base 16: mod_base = OTHER; note = cEt guanosine
gccatgacaatctccg

SEQ ID NO: 1034 - DNA, 16 bp, synthetic construct
  source 1..16: mol_type = other DNA
  modified_base 1..2: mod_base = OTHER; note = cEt guanosine 3'-phosphorothioate
  modified_base 3: mod_base = OTHER; note = cEt 5-methylcytidine 3'-phosphorothioate
  modified_base 4: mod_base = OTHER; note = 5-methyl-2'-deoxycytidine 3'-phosphorothioate
  modified_base 5: mod_base = OTHER; note = 2'-deoxyadenosine 3'-phosphorothioate
  modified_base 6: mod_base = OTHER; note = 2'-deoxythymidine 3'-phosphorothioate
  modified_base 7: mod_base = OTHER; note = 2'-deoxyguanosine 3'-phosphorothioate
  modified_base 8: mod_base = OTHER; note = 2'-deoxyadenosine 3'-phosphorothioate
  modified_base 9: mod_base = OTHER; note = 5-methyl-2'-deoxycytidine 3'-phosphorothioate
  modified_base 10..11: mod_base = OTHER; note = 2'-deoxyadenosine 3'-phosphorothioate
  modified_base 12: mod_base = OTHER; note = 2'-deoxythymidine 3'-phosphorothioate
  modified_base 13: mod_base = OTHER; note = 5-methyl-2'-deoxycytidine 3'-phosphorothioate
  modified_base 14: mod_base = OTHER; note = cEt thymidine 3'-phosphorothioate
  modified_base 15: mod_base = OTHER; note = cEt 5-methylcytidine 3'-phosphorothioate
  modified_base 16: mod_base = OTHER; note = cEt 5-methylcytidine
ggccatgacaatctcc

SEQ ID NO: 1035 - DNA, 16 bp, synthetic construct
  source 1..16: mol_type = other DNA
  modified_base 1..2: mod_base = OTHER; note = cEt 5-methylcytidine 3'-phosphorothioate
  modified_base 3: mod_base = OTHER; note = cEt adenosine 3'-phosphorothioate
  modified_base 4: mod_base = OTHER; note = 2'-deoxyadenosine 3'-phosphorothioate
  modified_base 5: mod_base = OTHER; note = 5-methyl-2'-deoxycytidine 3'-phosphorothioate
  modified_base 6: mod_base = OTHER; note = 2'-deoxythymidine 3'-phosphorothioate
  modified_base 7: mod_base = OTHER; note = 2'-deoxyguanosine 3'-phosphorothioate
  modified_base 8..9: mod_base = OTHER; note = 2'-deoxythymidine 3'-phosphorothioate
  modified_base 10: mod_base = OTHER; note = 5-methyl-2'-deoxycytidine 3'-phosphorothioate
  modified_base 11: mod_base = OTHER; note = 2'-deoxythymidine 3'-phosphorothioate
  modified_base 12: mod_base = OTHER; note = 5-methyl-2'-deoxycytidine 3'-phosphorothioate
  modified_base 13: mod_base = OTHER; note = 2'-deoxythymidine 3'-phosphorothioate
  modified_base 14: mod_base = OTHER; note = cEt thymidine 3'-phosphorothioate
  modified_base 15: mod_base = OTHER; note = cEt adenosine 3'-phosphorothioate
  modified_base 16: mod_base = OTHER; note = cEt guanosine
ccaactgttctcttag

SEQ ID NO: 1036 - DNA, 16 bp, synthetic construct
  source 1..16: mol_type = other DNA
  modified_base 1..2: mod_base = OTHER; note = cEt adenosine 3'-phosphorothioate
  modified_base 3: mod_base = OTHER; note = cEt 5-methylcytidine 3'-phosphorothioate
  modified_base 4: mod_base = OTHER; note = 5-methyl-2'-deoxycytidine 3'-phosphorothioate
  modified_base 5..6: mod_base = OTHER; note = 2'-deoxyadenosine 3'-phosphorothioate
  modified_base 7: mod_base = OTHER; note = 5-methyl-2'-deoxycytidine 3'-phosphorothioate
  modified_base 8: mod_base = OTHER; note = 2'-deoxythymidine 3'-phosphorothioate
  modified_base 9: mod_base = OTHER; note = 2'-deoxyguanosine 3'-phosphorothioate
  modified_base 10..11: mod_base = OTHER; note = 2'-deoxythymidine 3'-phosphorothioate
  modified_base 12: mod_base = OTHER; note = 5-methyl-2'-deoxycytidine 3'-phosphorothioate
  modified_base 13: mod_base = OTHER; note = 2'-deoxythymidine 3'-phosphorothioate
  modified_base 14: mod_base = OTHER; note = cEt 5-methylcytidine 3'-phosphorothioate
  modified_base 15: mod_base = OTHER; note = cEt thymidine 3'-phosphorothioate
  modified_base 16: mod_base = OTHER; note = cEt thymidine
aaccaactgttctctt

SEQ ID NO: 1037 - DNA, 16 bp, synthetic construct
  source 1..16: mol_type = other DNA
  modified_base 1..2: mod_base = OTHER; note = cEt 5-methylcytidine 3'-phosphorothioate
  modified_base 3: mod_base = OTHER; note = cEt adenosine 3'-phosphorothioate
  modified_base 4: mod_base = OTHER; note = 2'-deoxyguanosine 3'-phosphorothioate
  modified_base 5: mod_base = OTHER; note = 2'-deoxythymidine 3'-phosphorothioate
  modified_base 6..7: mod_base = OTHER; note = 2'-deoxyadenosine 3'-phosphorothioate
  modified_base 8: mod_base = OTHER; note = 2'-deoxythymidine 3'-phosphorothioate
  modified_base 9..12: mod_base = OTHER; note = 2'-deoxyadenosine 3'-phosphorothioate
  modified_base 13: mod_base = OTHER; note = 2'-deoxyguanosine 3'-phosphorothioate
  modified_base 14: mod_base = OTHER; note = cEt 5-methylcytidine 3'-phosphorothioate
  modified_base 15: mod_base = OTHER; note = cEt thymidine 3'-phosphorothioate
  modified_base 16: mod_base = OTHER; note = cEt guanosine
ccagtaataaaagctg

SEQ ID NO: 1038 - DNA, 16 bp, synthetic construct
  source 1..16: mol_type = other DNA
  modified_base 1: mod_base = OTHER; note = cEt guanosine 3'-phosphorothioate
  modified_base 2: mod_base = OTHER; note = cEt thymidine 3'-phosphorothioate
  modified_base 3: mod_base = OTHER; note = cEt 5-methylcytidine 3'-phosphorothioate
  modified_base 4: mod_base = OTHER; note = 5-methyl-2'-deoxycytidine 3'-phosphorothioate
  modified_base 5: mod_base = OTHER; note = 2'-deoxyadenosine 3'-phosphorothioate
  modified_base 6: mod_base = OTHER; note = 2'-deoxyguanosine 3'-phosphorothioate
  modified_base 7: mod_base = OTHER; note = 2'-deoxythymidine 3'-phosphorothioate
  modified_base 8..9: mod_base = OTHER; note = 2'-deoxyadenosine 3'-phosphorothioate
  modified_base 10: mod_base = OTHER; note = 2'-deoxythymidine 3'-phosphorothioate
  modified_base 11..13: mod_base = OTHER; note = 2'-deoxyadenosine 3'-phosphorothioate
  modified_base 14: mod_base = OTHER; note = cEt adenosine 3'-phosphorothioate
  modified_base 15: mod_base = OTHER; note = cEt guanosine 3'-phosphorothioate
  modified_base 16: mod_base = OTHER; note = cEt 5-methylcytidine
gtccagtaataaaagc

SEQ ID NO: 1039 - DNA, 16 bp, synthetic construct
  source 1..16: mol_type = other DNA
  modified_base 1: mod_base = OTHER; note = cEt guanosine 3'-phosphorothioate
  modified_base 2..3: mod_base = OTHER; note = cEt thymidine 3'-phosphorothioate
  modified_base 4: mod_base = OTHER; note = 2'-deoxyguanosine 3'-phosphorothioate
  modified_base 5: mod_base = OTHER; note = 2'-deoxythymidine 3'-phosphorothioate
  modified_base 6..7: mod_base = OTHER; note = 5-methyl-2'-deoxycytidine 3'-phosphorothioate
  modified_base 8: mod_base = OTHER; note = 2'-deoxyadenosine 3'-phosphorothioate
  modified_base 9: mod_base = OTHER; note = 2'-deoxyguanosine 3'-phosphorothioate
  modified_base 10: mod_base = OTHER; note = 2'-deoxythymidine 3'-phosphorothioate
  modified_base 11..12: mod_base = OTHER; note = 2'-deoxyadenosine 3'-phosphorothioate
  modified_base 13: mod_base = OTHER; note = 2'-deoxythymidine 3'-phosphorothioate
  modified_base 14..15: mod_base = OTHER; note = cEt adenosine 3'-phosphorothioate
  modified_base 16: mod_base = OTHER; note = cEt adenosine
gttgtccagtaataaa

SEQ ID NO: 1040 - DNA, 16 bp, synthetic construct
  source 1..16: mol_type = other DNA
  modified_base 1: mod_base = OTHER; note = cEt adenosine 3'-phosphorothioate
  modified_base 2: mod_base = OTHER; note = cEt thymidine 3'-phosphorothioate
  modified_base 3: mod_base = OTHER; note = cEt guanosine 3'-phosphorothioate
  modified_base 4..5: mod_base = OTHER; note = 2'-deoxythymidine 3'-phosphorothioate
  modified_base 6: mod_base = OTHER; note = 2'-deoxyguanosine 3'-phosphorothioate
  modified_base 7: mod_base = OTHER; note = 2'-deoxythymidine 3'-phosphorothioate
  modified_base 8..9: mod_base = OTHER; note = 5-methyl-2'-deoxycytidine 3'-phosphorothioate
  modified_base 10: mod_base = OTHER; note = 2'-deoxyadenosine 3'-phosphorothioate
  modified_base 11: mod_base = OTHER; note = 2'-deoxyguanosine 3'-phosphorothioate
  modified_base 12: mod_base = OTHER; note = 2'-deoxythymidine 3'-phosphorothioate
  modified_base 13: mod_base = OTHER; note = 2'-deoxyadenosine 3'-phosphorothioate
  modified_base 14: mod_base = OTHER; note = cEt adenosine 3'-phosphorothioate
  modified_base 15: mod_base = OTHER; note = cEt thymidine 3'-phosphorothioate
  modified_base 16: mod_base = OTHER; note = cEt adenosine
atgttgtccagtaata

SEQ ID NO: 1041 - DNA, 16 bp, synthetic construct
  source 1..16: mol_type = other DNA
  modified_base 1: mod_base = OTHER; note = cEt thymidine 3'-phosphorothioate
  modified_base 2..3: mod_base = OTHER; note = cEt adenosine 3'-phosphorothioate
  modified_base 4: mod_base = OTHER; note = 2'-deoxythymidine 3'-phosphorothioate
  modified_base 5: mod_base = OTHER; note = 2'-deoxyguanosine 3'-phosphorothioate
  modified_base 6..7: mod_base = OTHER; note = 2'-deoxythymidine 3'-phosphorothioate
  modified_base 8: mod_base = OTHER; note = 2'-deoxyguanosine 3'-phosphorothioate
  modified_base 9: mod_base = OTHER; note = 2'-deoxythymidine 3'-phosphorothioate
  modified_base 10..11: mod_base = OTHER; note = 5-methyl-2'-deoxycytidine 3'-phosphorothioate
  modified_base 12: mod_base = OTHER; note = 2'-deoxyadenosine 3'-phosphorothioate
  modified_base 13: mod_base = OTHER; note = 2'-deoxyguanosine 3'-phosphorothioate
  modified_base 14: mod_base = OTHER; note = cEt thymidine 3'-phosphorothioate
  modified_base 15: mod_base = OTHER; note = cEt adenosine 3'-phosphorothioate
  modified_base 16: mod_base = OTHER; note = cEt adenosine
taatgttgtccagtaa

SEQ ID NO: 1042 - DNA, 16 bp, synthetic construct
  source 1..16: mol_type = other DNA
  modified_base 1..2: mod_base = OTHER; note = cEt thymidine 3'-phosphorothioate
  modified_base 3: mod_base = OTHER; note = cEt 5-methylcytidine 3'-phosphorothioate
  modified_base 4..5: mod_base = OTHER; note = 2'-deoxyadenosine 3'-phosphorothioate
  modified_base 6: mod_base = OTHER; note = 2'-deoxythymidine 3'-phosphorothioate
  modified_base 7..8: mod_base = OTHER; note = 5-methyl-2'-deoxycytidine 3'-phosphorothioate
  modified_base 9: mod_base = OTHER; note = 2'-deoxythymidine 3'-phosphorothioate
  modified_base 10: mod_base = OTHER; note = 2'-deoxyguanosine 3'-phosphorothioate
  modified_base 11: mod_base = OTHER; note = 2'-deoxyadenosine 3'-phosphorothioate
  modified_base 12..13: mod_base = OTHER; note = 5-methyl-2'-deoxycytidine 3'-phosphorothioate
  modified_base 14: mod_base = OTHER; note = cEt 5-methylcytidine 3'-phosphorothioate
  modified_base 15: mod_base = OTHER; note = cEt adenosine 3'-phosphorothioate
  modified_base 16: mod_base = OTHER; note = cEt 5-methylcytidine
ttcaatcctgacccac

SEQ ID NO: 1043 - DNA, 16 bp, synthetic construct
  source 1..16: mol_type = other DNA
  modified_base 1..2: mod_base = OTHER; note = cEt guanosine 3'-phosphorothioate
  modified_base 3: mod_base = OTHER; note = cEt thymidine 3'-phosphorothioate
  modified_base 4: mod_base = OTHER; note = 2'-deoxythymidine 3'-phosphorothioate
  modified_base 5: mod_base = OTHER; note = 5-methyl-2'-deoxycytidine 3'-phosphorothioate
  modified_base 6..7: mod_base = OTHER; note = 2'-deoxyadenosine 3'-phosphorothioate
  modified_base 8: mod_base = OTHER; note = 2'-deoxythymidine 3'-phosphorothioate
  modified_base 9..10: mod_base = OTHER; note = 5-methyl-2'-deoxycytidine 3'-phosphorothioate
  modified_base 11: mod_base = OTHER; note = 2'-deoxythymidine 3'-phosphorothioate
  modified_base 12: mod_base = OTHER; note = 2'-deoxyguanosine 3'-phosphorothioate
  modified_base 13: mod_base = OTHER; note = 2'-deoxyadenosine 3'-phosphorothioate
  modified_base 14..15: mod_base = OTHER; note = cEt 5-methylcytidine 3'-phosphorothioate
  modified_base 16: mod_base = OTHER; note = cEt 5-methylcytidine
ggttcaatcctgaccc

SEQ ID NO: 1044 - DNA, 16 bp, synthetic construct
  source 1..16: mol_type = other DNA
  modified_base 1: mod_base = OTHER; note = cEt thymidine 3'-phosphorothioate
  modified_base 2..3: mod_base = OTHER; note = cEt guanosine 3'-phosphorothioate
  modified_base 4: mod_base = OTHER; note = 2'-deoxyguanosine 3'-phosphorothioate
  modified_base 5..6: mod_base = OTHER; note = 2'-deoxythymidine 3'-phosphorothioate
  modified_base 7: mod_base = OTHER; note = 5-methyl-2'-deoxycytidine 3'-phosphorothioate
  modified_base 8..9: mod_base = OTHER; note = 2'-deoxyadenosine 3'-phosphorothioate
  modified_base 10: mod_base = OTHER; note = 2'-deoxythymidine 3'-phosphorothioate
  modified_base 11..12: mod_base = OTHER; note = 2'-deoxythymidine 3'-phosphorothioate
  modified_base 13: mod_base = OTHER; note = 2'-deoxythymidine 3'-phosphorothioate
  modified_base 14: mod_base = OTHER; note = cEt guanosine 3'-phosphorothioate
  modified_base 15: mod_base = OTHER; note = cEt adenosine 3'-phosphorothioate
  modified_base 16: mod_base = OTHER; note = cEt 5-methylcytidine
tgggttcaatcctgac

SEQ ID NO: 1045 - DNA, 16 bp, synthetic construct
  source 1..16: mol_type = other DNA
  modified_base 1: mod_base = OTHER; note = cEt guanosine 3'-phosphorothioate
  modified_base 2: mod_base = OTHER; note = cEt adenosine 3'-phosphorothioate
  modified_base 3: mod_base = OTHER; note = cEt thymidine 3'-phosphorothioate
  modified_base 4..6: mod_base = OTHER; note = 2'-deoxyguanosine 3'-phosphorothioate
  modified_base 7..8: mod_base = OTHER; note = 2'-deoxythymidine 3'-phosphorothioate
  modified_base 9: mod_base = OTHER; note = 5-methyl-2'-deoxycytidine 3'-phosphorothioate
  modified_base 10..11: mod_base = OTHER; note = 2'-deoxyadenosine 3'-phosphorothioate
  modified_base 12: mod_base = OTHER; note = 2'-deoxythymidine 3'-phosphorothioate
  modified_base 13: mod_base = OTHER; note = 5-methyl-2'-deoxycytidine 3'-phosphorothioate
  modified_base 14: mod_base = OTHER; note = cEt 5-methylcytidine 3'-phosphorothioate
  modified_base 15: mod_base = OTHER; note = cEt thymidine 3'-phosphorothioate
  modified_base 16: mod_base = OTHER; note = cEt guanosine
gatgggttcaatcctg

SEQ ID NO: 1046 - DNA, 16 bp, synthetic construct
  source 1..16: mol_type = other DNA
  modified_base 1: mod_base = OTHER; note = cEt adenosine 3'-phosphorothioate
  modified_base 2..3: mod_base = OTHER; note = cEt guanosine 3'-phosphorothioate
  modified_base 4: mod_base = OTHER; note = 2'-deoxyadenosine 3'-phosphorothioate
  modified_base 5: mod_base = OTHER; note = 2'-deoxythymidine 3'-phosphorothioate
  modified_base 6..8: mod_base = OTHER; note = 2'-deoxyguanosine 3'-phosphorothioate
  modified_base 9..10: mod_base = OTHER; note = 2'-deoxythymidine 3'-phosphorothioate
  modified_base 11: mod_base = OTHER; note = 5-methyl-2'-deoxycytidine 3'-phosphorothioate
  modified_base 12..13: mod_base = OTHER; note = 2'-deoxyadenosine 3'-phosphorothioate
  modified_base 14: mod_base = OTHER; note = cEt thymidine 3'-phosphorothioate
  modified_base 15: mod_base = OTHER; note = cEt 5-methylcytidine 3'-phosphorothioate
  modified_base 16: mod_base = OTHER; note = cEt 5-methylcytidine
aggatgggttcaatcc

SEQ ID NO: 1047 - DNA, 16 bp, synthetic construct
  source 1..16: mol_type = other DNA
  modified_base 1: mod_base = OTHER; note = cEt adenosine 3'-phosphorothioate
  modified_base 3: mod_base = OTHER; note = cEt adenosine 3'-phosphorothioate
  modified_base 2: mod_base = OTHER; note = cEt guanosine 3'-phosphorothioate
  modified_base 4..5: mod_base = OTHER; note = 2'-deoxyguanosine 3'-phosphorothioate
  modified_base 6: mod_base = OTHER; note = 2'-deoxyadenosine 3'-phosphorothioate
  modified_base 7: mod_base = OTHER; note = 2'-deoxythymidine 3'-phosphorothioate
  modified_base 8..10: mod_base = OTHER; note = 2'-deoxyguanosine 3'-phosphorothioate
  modified_base 11..12: mod_base = OTHER; note = 2'-deoxythymidine 3'-phosphorothioate
  modified_base 13: mod_base = OTHER; note = 5-methyl-2'-deoxycytidine 3'-phosphorothioate
  modified_base 14..15: mod_base = OTHER; note = cEt adenosine 3'-phosphorothioate
  modified_base 16: mod_base = OTHER; note = cEt thymidine
agaggatgggttcaat

SEQ ID NO: 1048 - DNA, 16 bp, synthetic construct
  source 1..16: mol_type = other DNA
  modified_base 1: mod_base = OTHER; note = cEt adenosine 3'-phosphorothioate
  modified_base 3: mod_base = OTHER; note = cEt adenosine 3'-phosphorothioate
  modified_base 2: mod_base = OTHER; note = cEt thymidine 3'-phosphorothioate
  modified_base 4: mod_base = OTHER; note = 2'-deoxyguanosine 3'-phosphorothioate
  modified_base 5: mod_base = OTHER; note = 2'-deoxyadenosine 3'-phosphorothioate
  modified_base 6..7: mod_base = OTHER; note = 2'-deoxyguanosine 3'-phosphorothioate
  modified_base 8: mod_base = OTHER; note = 2'-deoxyadenosine 3'-phosphorothioate
  modified_base 9: mod_base = OTHER; note = 2'-deoxythymidine 3'-phosphorothioate
  modified_base 10..12: mod_base = OTHER; note = 2'-deoxyguanosine 3'-phosphorothioate
  modified_base 13: mod_base = OTHER; note = 2'-deoxythymidine 3'-phosphorothioate
  modified_base 14: mod_base = OTHER; note = cEt thymidine 3'-phosphorothioate
  modified_base 15: mod_base = OTHER; note = cEt 5-methylcytidine 3'-phosphorothioate
  modified_base 16: mod_base = OTHER; note = cEt adenosine
atagaggatgggttca

SEQ ID NO: 1049 - DNA, 16 bp, synthetic construct
  source 1..16: mol_type = other DNA
  modified_base 1..3: mod_base = OTHER; note = cEt 5-methylcytidine 3'-phosphorothioate
  modified_base 4: mod_base = OTHER; note = 2'-deoxythymidine 3'-phosphorothioate
  modified_base 5..6: mod_base = OTHER; note = 5-methyl-2'-deoxycytidine 3'-phosphorothioate
  modified_base 7: mod_base = OTHER; note = 2'-deoxythymidine 3'-phosphorothioate
  modified_base 8: mod_base = OTHER; note = 2'-deoxyguanosine 3'-phosphorothioate
  modified_base 9: mod_base = OTHER; note = 2'-deoxythymidine 3'-phosphorothioate
  modified_base 10..12: mod_base = OTHER; note = 2'-deoxyguanosine 3'-phosphorothioate
  modified_base 13: mod_base = OTHER; note = 2'-deoxyadenosine 3'-phosphorothioate
  modified_base 14: mod_base = OTHER; note = cEt adenosine 3'-phosphorothioate
  modified_base 15: mod_base = OTHER; note = cEt 5-methylcytidine 3'-phosphorothioate
  modified_base 16: mod_base = OTHER; note = cEt adenosine
ccctcctgtgggaaca

SEQ ID NO: 1050 - DNA, 16 bp, synthetic construct
  source 1..16: mol_type = other DNA
  modified_base 1: mod_base = OTHER; note = cEt guanosine 3'-phosphorothioate
  modified_base 2: mod_base = OTHER; note = cEt thymidine 3'-phosphorothioate
  modified_base 3: mod_base = OTHER; note = cEt 5-methylcytidine 3'-phosphorothioate
  modified_base 4..5: mod_base = OTHER; note = 5-methyl-2'-deoxycytidine 3'-phosphorothioate
  modified_base 6: mod_base = OTHER; note = 2'-deoxythymidine 3'-phosphorothioate
  modified_base 7..8: mod_base = OTHER; note = 5-methyl-2'-deoxycytidine 3'-phosphorothioate
  modified_base 9: mod_base = OTHER; note = 2'-deoxythymidine 3'-phosphorothioate
  modified_base 10: mod_base = OTHER; note = 2'-deoxyguanosine 3'-phosphorothioate
  modified_base 11: mod_base = OTHER; note = 2'-deoxythymidine 3'-phosphorothioate
  modified_base 12..13: mod_base = OTHER; note = 2'-deoxyguanosine 3'-phosphorothioate
  modified_base 14: mod_base = OTHER; note = cEt guanosine 3'-phosphorothioate
  modified_base 15: mod_base = OTHER; note = cEt adenosine 3'-phosphorothioate
  modified_base 16: mod_base = OTHER; note = cEt adenosine
gtccctcctgtgggaa

SEQ ID NO: 1051 - DNA, 16 bp, synthetic construct
  source 1..16: mol_type = other DNA
  modified_base 1: mod_base = OTHER; note = cEt 5-methylcytidine 3'-phosphorothioate
  modified_base 2: mod_base = OTHER; note = cEt adenosine 3'-phosphorothioate
  modified_base 3: mod_base = OTHER; note = cEt guanosine 3'-phosphorothioate
  modified_base 4: mod_base = OTHER; note = 2'-deoxythymidine 3'-phosphorothioate
  modified_base 5..7: mod_base = OTHER; note = 5-methyl-2'-deoxycytidine 3'-phosphorothioate
  modified_base 8: mod_base = OTHER; note = 2'-deoxythymidine 3'-phosphorothioate
  modified_base 9..10: mod_base = OTHER; note = 5-methyl-2'-deoxycytidine 3'-phosphorothioate
  modified_base 11: mod_base = OTHER; note = 2'-deoxythymidine 3'-phosphorothioate
  modified_base 12: mod_base = OTHER; note = 2'-deoxyguanosine 3'-phosphorothioate
  modified_base 13: mod_base = OTHER; note = 2'-deoxythymidine 3'-phosphorothioate
  modified_base 14..15: mod_base = OTHER; note = cEt guanosine 3'-phosphorothioate
  modified_base 16: mod_base = OTHER; note = cEt guanosine
cagtccctcctgtggg

SEQ ID NO: 1052 - DNA, 16 bp, synthetic construct
  source 1..16: mol_type = other DNA
  modified_base 1: mod_base = OTHER; note = cEt adenosine 3'-phosphorothioate
  modified_base 2: mod_base = OTHER; note = cEt guanosine 3'-phosphorothioate
  modified_base 3: mod_base = OTHER; note = cEt 5-methylcytidine 3'-phosphorothioate
  modified_base 4: mod_base = OTHER; note = 2'-deoxyadenosine 3'-phosphorothioate
  modified_base 5: mod_base = OTHER; note = 2'-deoxyguanosine 3'-phosphorothioate
  modified_base 6: mod_base = OTHER; note = 2'-deoxythymidine 3'-phosphorothioate
  modified_base 7..9: mod_base = OTHER; note = 5-methyl-2'-deoxycytidine 3'-phosphorothioate
  modified_base 10: mod_base = OTHER; note = 2'-deoxythymidine 3'-phosphorothioate
  modified_base 11..12: mod_base = OTHER; note = 5-methyl-2'-deoxycytidine 3'-phosphorothioate
  modified_base 13: mod_base = OTHER; note = 2'-deoxythymidine 3'-phosphorothioate
  modified_base 14: mod_base = OTHER; note = cEt guanosine 3'-phosphorothioate
  modified_base 15: mod_base = OTHER; note = cEt thymidine 3'-phosphorothioate
  modified_base 16: mod_base = OTHER; note = cEt guanosine
agcagtccctcctgtg

SEQ ID NO: 1053 - DNA, 16 bp, synthetic construct
  source 1..16: mol_type = other DNA
  modified_base 1: mod_base = OTHER; note = cEt adenosine 3'-phosphorothioate
  modified_base 2: mod_base = OTHER; note = cEt 5-methylcytidine 3'-phosphorothioate
  modified_base 3: mod_base = OTHER; note = cEt thymidine 3'-phosphorothioate
  modified_base 4: mod_base = OTHER; note = 5-methyl-2'-deoxycytidine 3'-phosphorothioate
  modified_base 5: mod_base = OTHER; note = 2'-deoxyadenosine 3'-phosphorothioate
  modified_base 6: mod_base = OTHER; note = 2'-deoxyguanosine 3'-phosphorothioate
  modified_base 7: mod_base = OTHER; note = 5-methyl-2'-deoxycytidine 3'-phosphorothioate
  modified_base 8: mod_base = OTHER; note = 2'-deoxythymidine 3'-phosphorothioate
  modified_base 9: mod_base = OTHER; note = 2'-deoxyguanosine 3'-phosphorothioate
  modified_base 10: mod_base = OTHER; note = 2'-deoxythymidine 3'-phosphorothioate
  modified_base 11..13: mod_base = OTHER; note = 2'-deoxyguanosine 3'-phosphorothioate
  modified_base 14..15: mod_base = OTHER; note = cEt adenosine 3'-phosphorothioate
  modified_base 16: mod_base = OTHER; note = cEt guanosine
actcagctgtgggaag

SEQ ID NO: 1054 - DNA, 16 bp, synthetic construct
  source 1..16: mol_type = other DNA
  modified_base 1..3: mod_base = OTHER; note = cEt 5-methylcytidine 3'-phosphorothioate
  modified_base 4: mod_base = OTHER; note = 2'-deoxyadenosine 3'-phosphorothioate
  modified_base 5: mod_base = OTHER; note = 5-methyl-2'-deoxycytidine 3'-phosphorothioate
  modified_base 6: mod_base = OTHER; note = 2'-deoxythymidine 3'-phosphorothioate
  modified_base 7: mod_base = OTHER; note = 5-methyl-2'-deoxycytidine 3'-phosphorothioate
  modified_base 8: mod_base = OTHER; note = 2'-deoxyadenosine 3'-phosphorothioate
  modified_base 9: mod_base = OTHER; note = 2'-deoxyguanosine 3'-phosphorothioate
  modified_base 10: mod_base = OTHER; note = 5-methyl-2'-deoxycytidine 3'-phosphorothioate
  modified_base 11: mod_base = OTHER; note = 2'-deoxythymidine 3'-phosphorothioate
  modified_base 12: mod_base = OTHER; note = 2'-deoxyguanosine 3'-phosphorothioate
  modified_base 13: mod_base = OTHER; note = 2'-deoxythymidine 3'-phosphorothioate
  modified_base 14..15: mod_base = OTHER; note = cEt guanosine 3'-phosphorothioate
  modified_base 16: mod_base = OTHER; note = cEt guanosine
cccactcagctgtggg

SEQ ID NO: 1055 - DNA, 16 bp, synthetic construct
  source 1..16: mol_type = other DNA
  modified_base 1: mod_base = OTHER; note = cEt adenosine 3'-phosphorothioate
  modified_base 2..3: mod_base = OTHER; note = cEt 5-methylcytidine 3'-phosphorothioate
  modified_base 4..5: mod_base = OTHER; note = 5-methyl-2'-deoxycytidine 3'-phosphorothioate
  modified_base 6: mod_base = OTHER; note = 2'-deoxyadenosine 3'-phosphorothioate
  modified_base 7: mod_base = OTHER; note = 5-methyl-2'-deoxycytidine 3'-phosphorothioate
  modified_base 8: mod_base = OTHER; note = 2'-deoxythymidine 3'-phosphorothioate
  modified_base 9: mod_base = OTHER; note = 5-methyl-2'-deoxycytidine 3'-phosphorothioate
  modified_base 10: mod_base = OTHER; note = 2'-deoxyadenosine 3'-phosphorothioate
  modified_base 11: mod_base = OTHER; note = 2'-deoxyguanosine 3'-phosphorothioate
  modified_base 12: mod_base = OTHER; note = 5-methyl-2'-deoxycytidine 3'-phosphorothioate
  modified_base 13: mod_base = OTHER; note = 2'-deoxythymidine 3'-phosphorothioate
  modified_base 14: mod_base = OTHER; note = cEt guanosine 3'-phosphorothioate
  modified_base 15: mod_base = OTHER; note = cEt thymidine 3'-phosphorothioate
  modified_base 16: mod_base = OTHER; note = cEt guanosine
accccactcagctgtg

SEQ ID NO: 1056 - DNA, 16 bp, synthetic construct
  source 1..16: mol_type = other DNA
  modified_base 1: mod_base = OTHER; note = cEt adenosine 3'-phosphorothioate
  modified_base 3: mod_base = OTHER; note = cEt adenosine 3'-phosphorothioate
  modified_base 2: mod_base = OTHER; note = cEt 5-methylcytidine 3'-phosphorothioate
  modified_base 4..7: mod_base = OTHER; note = 5-methyl-2'-deoxycytidine 3'-phosphorothioate
  modified_base 8: mod_base = OTHER; note = 2'-deoxyadenosine 3'-phosphorothioate
  modified_base 9: mod_base = OTHER; note = 5-methyl-2'-deoxycytidine 3'-phosphorothioate
  modified_base 10: mod_base = OTHER; note = 2'-deoxythymidine 3'-phosphorothioate
  modified_base 11: mod_base = OTHER; note = 5-methyl-2'-deoxycytidine 3'-phosphorothioate
  modified_base 12: mod_base = OTHER; note = 2'-deoxyadenosine 3'-phosphorothioate
  modified_base 13: mod_base = OTHER; note = 2'-deoxyguanosine 3'-phosphorothioate
  modified_base 14: mod_base = OTHER; note = cEt 5-methylcytidine 3'-phosphorothioate
  modified_base 15: mod_base = OTHER; note = cEt thymidine 3'-phosphorothioate
  modified_base 16: mod_base = OTHER; note = cEt guanosine
acaccccactcagctg

SEQ ID NO: 1057 - DNA, 16 bp, synthetic construct
  source 1..16: mol_type = other DNA
  modified_base 1: mod_base = OTHER; note = cEt guanosine 3'-phosphorothioate
  modified_base 2: mod_base = OTHER; note = cEt 5-methylcytidine 3'-phosphorothioate
  modified_base 3: mod_base = OTHER; note = cEt adenosine 3'-phosphorothioate
  modified_base 4: mod_base = OTHER; note = 5-methyl-2'-deoxycytidine 3'-phosphorothioate
  modified_base 5: mod_base = OTHER; note = 2'-deoxyadenosine 3'-phosphorothioate
  modified_base 6..9: mod_base = OTHER; note = 5-methyl-2'-deoxycytidine 3'-phosphorothioate
  modified_base 10: mod_base = OTHER; note = 2'-deoxyadenosine 3'-phosphorothioate
  modified_base 11: mod_base = OTHER; note = 5-methyl-2'-deoxycytidine 3'-phosphorothioate
  modified_base 12: mod_base = OTHER; note = 2'-deoxythymidine 3'-phosphorothioate
  modified_base 13: mod_base = OTHER; note = 5-methyl-2'-deoxycytidine 3'-phosphorothioate
  modified_base 14: mod_base = OTHER; note = cEt adenosine 3'-phosphorothioate
  modified_base 15: mod_base = OTHER; note = cEt guanosine 3'-phosphorothioate
  modified_base 16: mod_base = OTHER; note = cEt 5-methylcytidine
gcacaccccactcagc

SEQ ID NO: 1058 - DNA, 16 bp, synthetic construct
  source 1..16: mol_type = other DNA
  modified_base 1: mod_base = OTHER; note = cEt thymidine 3'-phosphorothioate
  modified_base 2: mod_base = OTHER; note = cEt 5-methylcytidine 3'-phosphorothioate
  modified_base 3: mod_base = OTHER; note = cEt adenosine 3'-phosphorothioate
  modified_base 4: mod_base = OTHER; note = 2'-deoxyguanosine 3'-phosphorothioate
  modified_base 5: mod_base = OTHER; note = 5-methyl-2'-deoxycytidine 3'-phosphorothioate
  modified_base 6: mod_base = OTHER; note = 2'-deoxyadenosine 3'-phosphorothioate
  modified_base 7: mod_base = OTHER; note = 5-methyl-2'-deoxycytidine 3'-phosphorothioate
  modified_base 8: mod_base = OTHER; note = 2'-deoxyadenosine 3'-phosphorothioate
  modified_base 9..12: mod_base = OTHER; note = 5-methyl-2'-deoxycytidine 3'-phosphorothioate
  modified_base 13: mod_base = OTHER; note = 2'-deoxyadenosine 3'-phosphorothioate
  modified_base 14: mod_base = OTHER; note = cEt 5-methylcytidine 3'-phosphorothioate
  modified_base 15: mod_base = OTHER; note = cEt thymidine 3'-phosphorothioate
  modified_base 16: mod_base = OTHER; note = cEt 5-methylcytidine
tcagcacaccccactc

SEQ ID NO: 1059 - DNA, 16 bp, synthetic construct
  source 1..16: mol_type = other DNA
  modified_base 1: mod_base = OTHER; note = cEt guanosine 3'-phosphorothioate
  modified_base 3: mod_base = OTHER; note = cEt guanosine 3'-phosphorothioate
  modified_base 2: mod_base = OTHER; note = cEt thymidine 3'-phosphorothioate
  modified_base 4: mod_base = OTHER; note = 2'-deoxyguanosine 3'-phosphorothioate
  modified_base 5: mod_base = OTHER; note = 2'-deoxythymidine 3'-phosphorothioate
  modified_base 6..7: mod_base = OTHER; note = 5-methyl-2'-deoxycytidine 3'-phosphorothioate
  modified_base 8: mod_base = OTHER; note = 2'-deoxythymidine 3'-phosphorothioate
  modified_base 9..10: mod_base = OTHER; note = 2'-deoxyadenosine 3'-phosphorothioate
  modified_base 11: mod_base = OTHER; note = 2'-deoxyguanosine 3'-phosphorothioate
  modified_base 12: mod_base = OTHER; note = 2'-deoxyadenosine 3'-phosphorothioate
  modified_base 13: mod_base = OTHER; note = 5-methyl-2'-deoxycytidine 3'-phosphorothioate
  modified_base 14: mod_base = OTHER; note = cEt thymidine 3'-phosphorothioate
  modified_base 15: mod_base = OTHER; note = cEt guanosine 3'-phosphorothioate
  modified_base 16: mod_base = OTHER; note = cEt guanosine
gtggtcctaagactgg

SEQ ID NO: 1060 - DNA, 16 bp, synthetic construct
  source 1..16: mol_type = other DNA
  modified_base 1: mod_base = OTHER; note = cEt guanosine 3'-phosphorothioate
  modified_base 2: mod_base = OTHER; note = cEt adenosine 3'-phosphorothioate
  modified_base 3: mod_base = OTHER; note = cEt thymidine 3'-phosphorothioate
  modified_base 4: mod_base = OTHER; note = 2'-deoxyguanosine 3'-phosphorothioate
  modified_base 5: mod_base = OTHER; note = 2'-deoxythymidine 3'-phosphorothioate
  modified_base 6..7: mod_base = OTHER; note = 2'-deoxyguanosine 3'-phosphorothioate
  modified_base 8: mod_base = OTHER; note = 2'-deoxythymidine 3'-phosphorothioate
  modified_base 9..10: mod_base = OTHER; note = 5-methyl-2'-deoxycytidine 3'-phosphorothioate
  modified_base 11: mod_base = OTHER; note = 2'-deoxythymidine 3'-phosphorothioate
  modified_base 12..13: mod_base = OTHER; note = 2'-deoxyadenosine 3'-phosphorothioate
  modified_base 14: mod_base = OTHER; note = cEt guanosine 3'-phosphorothioate
  modified_base 15: mod_base = OTHER; note = cEt adenosine 3'-phosphorothioate
  modified_base 16: mod_base = OTHER; note = cEt 5-methylcytidine
gatgtggtcctaagac

SEQ ID NO: 1061 - DNA, 16 bp, synthetic construct
  source 1..16: mol_type = other DNA
  modified_base 1: mod_base = OTHER; note = cEt 5-methylcytidine 3'-phosphorothioate
  modified_base 2: mod_base = OTHER; note = cEt adenosine 3'-phosphorothioate
  modified_base 3: mod_base = OTHER; note = cEt guanosine 3'-phosphorothioate
  modified_base 4: mod_base = OTHER; note = 2'-deoxyadenosine 3'-phosphorothioate
  modified_base 5: mod_base = OTHER; note = 2'-deoxythymidine 3'-phosphorothioate
  modified_base 7: mod_base = OTHER; note = 2'-deoxythymidine 3'-phosphorothioate
  modified_base 6: mod_base = OTHER; note = 2'-deoxyguanosine 3'-phosphorothioate
  modified_base 8..9: mod_base = OTHER; note = 2'-deoxyguanosine 3'-phosphorothioate
  modified_base 10: mod_base = OTHER; note = 2'-deoxythymidine 3'-phosphorothioate
  modified_base 11..12: mod_base = OTHER; note = 5-methyl-2'-deoxycytidine 3'-phosphorothioate
  modified_base 13: mod_base = OTHER; note = 2'-deoxythymidine 3'-phosphorothioate
  modified_base 14..15: mod_base = OTHER; note = cEt adenosine 3'-phosphorothioate
  modified_base 16: mod_base = OTHER; note = cEt guanosine
cagatgtggtcctaag

SEQ ID NO: 1062 - DNA, 16 bp, synthetic construct
  source 1..16: mol_type = other DNA
  modified_base 1..2: mod_base = OTHER; note = cEt 5-methylcytidine 3'-phosphorothioate
  modified_base 3: mod_base = OTHER; note = cEt thymidine 3'-phosphorothioate
  modified_base 4..5: mod_base = OTHER; note = 5-methyl-2'-deoxycytidine 3'-phosphorothioate
  modified_base 6: mod_base = OTHER; note = 2'-deoxyadenosine 3'-phosphorothioate
  modified_base 7: mod_base = OTHER; note = 5-methyl-2'-deoxycytidine 3'-phosphorothioate
  modified_base 8: mod_base = OTHER; note = 2'-deoxyadenosine 3'-phosphorothioate
  modified_base 9: mod_base = OTHER; note = 2'-deoxyguanosine 3'-phosphorothioate
  modified_base 10: mod_base = OTHER; note = 2'-deoxyadenosine 3'-phosphorothioate
  modified_base 11: mod_base = OTHER; note = 2'-deoxythymidine 3'-phosphorothioate
  modified_base 12: mod_base = OTHER; note = 2'-deoxyguanosine 3'-phosphorothioate
  modified_base 13: mod_base = OTHER; note = 2'-deoxythymidine 3'-phosphorothioate
  modified_base 14..15: mod_base = OTHER; note = cEt guanosine 3'-phosphorothioate
  modified_base 16: mod_base = OTHER; note = cEt thymidine
cctccacagatgtggt

SEQ ID NO: 1063 - DNA, 16 bp, synthetic construct
  source 1..16: mol_type = other DNA
  modified_base 1: mod_base = OTHER; note = cEt 5-methylcytidine 3'-phosphorothioate
  modified_base 3: mod_base = OTHER; note = cEt 5-methylcytidine 3'-phosphorothioate
  modified_base 2: mod_base = OTHER; note = cEt adenosine 3'-phosphorothioate
  modified_base 4: mod_base = OTHER; note = 5-methyl-2'-deoxycytidine 3'-phosphorothioate
  modified_base 5: mod_base = OTHER; note = 2'-deoxythymidine 3'-phosphorothioate
  modified_base 6..7: mod_base = OTHER; note = 5-methyl-2'-deoxycytidine 3'-phosphorothioate
  modified_base 8: mod_base = OTHER; note = 2'-deoxyadenosine 3'-phosphorothioate
  modified_base 9: mod_base = OTHER; note = 5-methyl-2'-deoxycytidine 3'-phosphorothioate
  modified_base 10: mod_base = OTHER; note = 2'-deoxyadenosine 3'-phosphorothioate
  modified_base 11: mod_base = OTHER; note = 2'-deoxyguanosine 3'-phosphorothioate
  modified_base 12: mod_base = OTHER; note = 2'-deoxyadenosine 3'-phosphorothioate
  modified_base 13: mod_base = OTHER; note = 2'-deoxythymidine 3'-phosphorothioate
  modified_base 14: mod_base = OTHER; note = cEt guanosine 3'-phosphorothioate
  modified_base 15: mod_base = OTHER; note = cEt thymidine 3'-phosphorothioate
  modified_base 16: mod_base = OTHER; note = cEt guanosine
cacctccacagatgtg

SEQ ID NO: 1064 - DNA, 16 bp, synthetic construct
  source 1..16: mol_type = other DNA
  modified_base 1..2: mod_base = OTHER; note = cEt guanosine 3'-phosphorothioate
  modified_base 3: mod_base = OTHER; note = cEt 5-methylcytidine 3'-phosphorothioate
  modified_base 4: mod_base = OTHER; note = 5-methyl-2'-deoxycytidine 3'-phosphorothioate
  modified_base 5: mod_base = OTHER; note = 2'-deoxyadenosine 3'-phosphorothioate
  modified_base 6..7: mod_base = OTHER; note = 5-methyl-2'-deoxycytidine 3'-phosphorothioate
  modified_base 8: mod_base = OTHER; note = 2'-deoxythymidine 3'-phosphorothioate
  modified_base 9..10: mod_base = OTHER; note = 5-methyl-2'-deoxycytidine 3'-phosphorothioate
  modified_base 11: mod_base = OTHER; note = 2'-deoxyadenosine 3'-phosphorothioate
  modified_base 12: mod_base = OTHER; note = 5-methyl-2'-deoxycytidine 3'-phosphorothioate
  modified_base 13: mod_base = OTHER; note = 2'-deoxyadenosine 3'-phosphorothioate
  modified_base 14: mod_base = OTHER; note = cEt guanosine 3'-phosphorothioate
  modified_base 15: mod_base = OTHER; note = cEt adenosine 3'-phosphorothioate
  modified_base 16: mod_base = OTHER; note = cEt thymidine
ggccacctccacagat

SEQ ID NO: 1065 - DNA, 16 bp, synthetic construct
  source 1..16: mol_type = other DNA
  modified_base 1: mod_base = OTHER; note = cEt thymidine 3'-phosphorothioate
  modified_base 2: mod_base = OTHER; note = cEt guanosine 3'-phosphorothioate
  modified_base 3: mod_base = OTHER; note = cEt 5-methylcytidine 3'-phosphorothioate
  modified_base 4..5: mod_base = OTHER; note = 2'-deoxythymidine 3'-phosphorothioate
  modified_base 6..7: mod_base = OTHER; note = 2'-deoxyguanosine 3'-phosphorothioate
  modified_base 8: mod_base = OTHER; note = 5-methyl-2'-deoxycytidine 3'-phosphorothioate
  modified_base 9: mod_base = OTHER; note = 2'-deoxythymidine 3'-phosphorothioate
  modified_base 10: mod_base = OTHER; note = 5-methyl-2'-deoxycytidine 3'-phosphorothioate
  modified_base 11: mod_base = OTHER; note = 2'-deoxythymidine 3'-phosphorothioate
  modified_base 12..13: mod_base = OTHER; note = 2'-deoxyguanosine 3'-phosphorothioate
  modified_base 14..15: mod_base = OTHER; note = cEt 5-methylcytidine 3'-phosphorothioate
  modified_base 16: mod_base = OTHER; note = cEt adenosine
tgcttggctctggcca

SEQ ID NO: 1066 - DNA, 16 bp, synthetic construct
  source 1..16: mol_type = other DNA
  modified_base 1: mod_base = OTHER; note = cEt adenosine 3'-phosphorothioate
  modified_base 2: mod_base = OTHER; note = cEt 5-methylcytidine 3'-phosphorothioate
  modified_base 3: mod_base = OTHER; note = cEt thymidine 3'-phosphorothioate
  modified_base 4: mod_base = OTHER; note = 2'-deoxyguanosine 3'-phosphorothioate
  modified_base 5: mod_base = OTHER; note = 5-methyl-2'-deoxycytidine 3'-phosphorothioate
  modified_base 6..7: mod_base = OTHER; note = 2'-deoxythymidine 3'-phosphorothioate
  modified_base 8..9: mod_base = OTHER; note = 2'-deoxyguanosine 3'-phosphorothioate
  modified_base 10: mod_base = OTHER; note = 5-methyl-2'-deoxycytidine 3'-phosphorothioate
  modified_base 11: mod_base = OTHER; note = 2'-deoxythymidine 3'-phosphorothioate
  modified_base 12: mod_base = OTHER; note = 5-methyl-2'-deoxycytidine 3'-phosphorothioate
  modified_base 13: mod_base = OTHER; note = 2'-deoxythymidine 3'-phosphorothioate
  modified_base 14..15: mod_base = OTHER; note = cEt guanosine 3'-phosphorothioate
  modified_base 16: mod_base = OTHER; note = cEt 5-methylcytidine
actgcttggctctggc

SEQ ID NO: 1067 - DNA, 16 bp, synthetic construct
  source 1..16: mol_type = other DNA
  modified_base 1: mod_base = OTHER; note = cEt adenosine 3'-phosphorothioate
  modified_base 3: mod_base = OTHER; note = cEt adenosine 3'-phosphorothioate
  modified_base 2: mod_base = OTHER; note = cEt guanosine 3'-phosphorothioate
  modified_base 4: mod_base = OTHER; note = 5-methyl-2'-deoxycytidine 3'-phosphorothioate
  modified_base 5: mod_base = OTHER; note = 2'-deoxythymidine 3'-phosphorothioate
  modified_base 6: mod_base = OTHER; note = 2'-deoxyguanosine 3'-phosphorothioate
  modified_base 7: mod_base = OTHER; note = 5-methyl-2'-deoxycytidine 3'-phosphorothioate
  modified_base 8..9: mod_base = OTHER; note = 2'-deoxythymidine 3'-phosphorothioate
  modified_base 10..11: mod_base = OTHER; note = 2'-deoxyguanosine 3'-phosphorothioate
  modified_base 12: mod_base = OTHER; note = 5-methyl-2'-deoxycytidine 3'-phosphorothioate
  modified_base 13: mod_base = OTHER; note = 2'-deoxythymidine 3'-phosphorothioate
  modified_base 14: mod_base = OTHER; note = cEt 5-methylcytidine 3'-phosphorothioate
  modified_base 15: mod_base = OTHER; note = cEt thymidine 3'-phosphorothioate
  modified_base 16: mod_base = OTHER; note = cEt guanosine
agactgcttggctctg

SEQ ID NO: 1068 - DNA, 16 bp, synthetic construct
  source 1..16: mol_type = other DNA
  modified_base 1..2: mod_base = OTHER; note = cEt guanosine 3'-phosphorothioate
  modified_base 3: mod_base = OTHER; note = cEt adenosine 3'-phosphorothioate
  modified_base 4: mod_base = OTHER; note = 2'-deoxyguanosine 3'-phosphorothioate
  modified_base 5: mod_base = OTHER; note = 2'-deoxyadenosine 3'-phosphorothioate
  modified_base 6: mod_base = OTHER; note = 5-methyl-2'-deoxycytidine 3'-phosphorothioate
  modified_base 7: mod_base = OTHER; note = 2'-deoxythymidine 3'-phosphorothioate
  modified_base 8: mod_base = OTHER; note = 2'-deoxyguanosine 3'-phosphorothioate
  modified_base 9: mod_base = OTHER; note = 5-methyl-2'-deoxycytidine 3'-phosphorothioate
  modified_base 10..11: mod_base = OTHER; note = 2'-deoxythymidine 3'-phosphorothioate
  modified_base 12..13: mod_base = OTHER; note = 2'-deoxyguanosine 3'-phosphorothioate
  modified_base 14: mod_base = OTHER; note = cEt 5-methylcytidine 3'-phosphorothioate
  modified_base 15: mod_base = OTHER; note = cEt thymidine 3'-phosphorothioate
  modified_base 16: mod_base = OTHER; note = cEt 5-methylcytidine
ggagactgcttggctc

SEQ ID NO: 1069 - DNA, 16 bp, synthetic construct
  source 1..16: mol_type = other DNA
  modified_base 1: mod_base = OTHER; note = cEt thymidine 3'-phosphorothioate
  modified_base 2: mod_base = OTHER; note = cEt guanosine 3'-phosphorothioate
  modified_base 3: mod_base = OTHER; note = cEt 5-methylcytidine 3'-phosphorothioate
  modified_base 4: mod_base = OTHER; note = 2'-deoxyadenosine 3'-phosphorothioate
  modified_base 5: mod_base = OTHER; note = 2'-deoxyguanosine 3'-phosphorothioate
  modified_base 6: mod_base = OTHER; note = 2'-deoxyadenosine 3'-phosphorothioate
  modified_base 7..10: mod_base = OTHER; note = 5-methyl-2'-deoxycytidine 3'-phosphorothioate
  modified_base 11: mod_base = OTHER; note = 2'-deoxythymidine 3'-phosphorothioate
  modified_base 12: mod_base = OTHER; note = 5-methyl-2'-deoxycytidine 3'-phosphorothioate
  modified_base 13: mod_base = OTHER; note = 2'-deoxythymidine 3'-phosphorothioate
  modified_base 14: mod_base = OTHER; note = cEt thymidine 3'-phosphorothioate
  modified_base 15: mod_base = OTHER; note = cEt 5-methylcytidine 3'-phosphorothioate
  modified_base 16: mod_base = OTHER; note = cEt thymidine
tgcagacccctcttct

SEQ ID NO: 1070 - DNA, 16 bp, synthetic construct
  source 1..16: mol_type = other DNA
  modified_base 1: mod_base = OTHER; note = cEt 5-methylcytidine 3'-phosphorothioate
  modified_base 3: mod_base = OTHER; note = cEt 5-methylcytidine 3'-phosphorothioate
  modified_base 2: mod_base = OTHER; note = cEt thymidine 3'-phosphorothioate
  modified_base 4: mod_base = OTHER; note = 5-methyl-2'-deoxycytidine 3'-phosphorothioate
  modified_base 5: mod_base = OTHER; note = 2'-deoxythymidine 3'-phosphorothioate
  modified_base 6..8: mod_base = OTHER; note = 5-methyl-2'-deoxycytidine 3'-phosphorothioate
  modified_base 9..10: mod_base = OTHER; note = 2'-deoxythymidine 3'-phosphorothioate
  modified_base 11: mod_base = OTHER; note = 2'-deoxyguanosine 3'-phosphorothioate
  modified_base 12: mod_base = OTHER; note = 2'-deoxyadenosine 3'-phosphorothioate
  modified_base 13: mod_base = OTHER; note = 5-methyl-2'-deoxycytidine 3'-phosphorothioate
  modified_base 14: mod_base = OTHER; note = cEt adenosine 3'-phosphorothioate
  modified_base 15: mod_base = OTHER; note = cEt thymidine 3'-phosphorothioate
  modified_base 16: mod_base = OTHER; note = cEt guanosine
ctcctcccttgacatg

SEQ ID NO: 1071 - DNA, 16 bp, synthetic construct
  source 1..16: mol_type = other DNA
  modified_base 1..2: mod_base = OTHER; note = cEt 5-methylcytidine 3'-phosphorothioate
  modified_base 3: mod_base = OTHER; note = cEt adenosine 3'-phosphorothioate
  modified_base 4: mod_base = OTHER; note = 2'-deoxyguanosine 3'-phosphorothioate
  modified_base 5: mod_base = OTHER; note = 2'-deoxyadenosine 3'-phosphorothioate
  modified_base 6..10: mod_base = OTHER; note = 5-methyl-2'-deoxycytidine 3'-phosphorothioate
  modified_base 11: mod_base = OTHER; note = 2'-deoxyadenosine 3'-phosphorothioate
  modified_base 12: mod_base = OTHER; note = 2'-deoxythymidine 3'-phosphorothioate
  modified_base 13: mod_base = OTHER; note = 2'-deoxyguanosine 3'-phosphorothioate
  modified_base 14..15: mod_base = OTHER; note = cEt thymidine 3'-phosphorothioate
  modified_base 16: mod_base = OTHER; note = cEt 5-methylcytidine
ccagacccccatgttc

SEQ ID NO: 1072 - DNA, 16 bp, synthetic construct
  source 1..16: mol_type = other DNA
  modified_base 1: mod_base = OTHER; note = cEt guanosine 3'-phosphorothioate
  modified_base 2: mod_base = OTHER; note = cEt thymidine 3'-phosphorothioate
  modified_base 3: mod_base = OTHER; note = cEt 5-methylcytidine 3'-phosphorothioate
  modified_base 4: mod_base = OTHER; note = 5-methyl-2'-deoxycytidine 3'-phosphorothioate
  modified_base 5: mod_base = OTHER; note = 2'-deoxyadenosine 3'-phosphorothioate
  modified_base 6: mod_base = OTHER; note = 2'-deoxyguanosine 3'-phosphorothioate
  modified_base 7: mod_base = OTHER; note = 2'-deoxyadenosine 3'-phosphorothioate
  modified_base 8..12: mod_base = OTHER; note = 5-methyl-2'-deoxycytidine 3'-phosphorothioate
  modified_base 13: mod_base = OTHER; note = 2'-deoxyadenosine 3'-phosphorothioate
  modified_base 14: mod_base = OTHER; note = cEt thymidine 3'-phosphorothioate
  modified_base 15: mod_base = OTHER; note = cEt guanosine 3'-phosphorothioate
  modified_base 16: mod_base = OTHER; note = cEt thymidine
gtccagacccccatgt

SEQ ID NO: 1073 - DNA, 16 bp, synthetic construct
  source 1..16: mol_type = other DNA
  modified_base 1..3: mod_base = OTHER; note = cEt guanosine 3'-phosphorothioate
  modified_base 4: mod_base = OTHER; note = 2'-deoxythymidine 3'-phosphorothioate
  modified_base 5..6: mod_base = OTHER; note = 5-methyl-2'-deoxycytidine 3'-phosphorothioate
  modified_base 7: mod_base = OTHER; note = 2'-deoxyadenosine 3'-phosphorothioate
  modified_base 8: mod_base = OTHER; note = 2'-deoxyguanosine 3'-phosphorothioate
  modified_base 9: mod_base = OTHER; note = 2'-deoxyadenosine 3'-phosphorothioate
  modified_base 10..13: mod_base = OTHER; note = 5-methyl-2'-deoxycytidine 3'-phosphorothioate
  modified_base 14: mod_base = OTHER; note = cEt 5-methylcytidine 3'-phosphorothioate
  modified_base 15: mod_base = OTHER; note = cEt adenosine 3'-phosphorothioate
  modified_base 16: mod_base = OTHER; note = cEt thymidine
gggtccagacccccat

SEQ ID NO: 1074 - DNA, 16 bp, synthetic construct
  source 1..16: mol_type = other DNA
  modified_base 1: mod_base = OTHER; note = cEt adenosine 3'-phosphorothioate
  modified_base 2..3: mod_base = OTHER; note = cEt 5-methylcytidine 3'-phosphorothioate
  modified_base 4..5: mod_base = OTHER; note = 2'-deoxythymidine 3'-phosphorothioate
  modified_base 6: mod_base = OTHER; note = 5-methyl-2'-deoxycytidine 3'-phosphorothioate
  modified_base 7: mod_base = OTHER; note = 2'-deoxythymidine 3'-phosphorothioate
  modified_base 8: mod_base = OTHER; note = 2'-deoxyguanosine 3'-phosphorothioate
  modified_base 9: mod_base = OTHER; note = 5-methyl-2'-deoxycytidine 3'-phosphorothioate
  modified_base 10: mod_base = OTHER; note = 2'-deoxyadenosine 3'-phosphorothioate
  modified_base 11..13: mod_base = OTHER; note = 2'-deoxyguanosine 3'-phosphorothioate
  modified_base 14: mod_base = OTHER; note = cEt adenosine 3'-phosphorothioate
  modified_base 15: mod_base = OTHER; note = cEt 5-methylcytidine 3'-phosphorothioate
  modified_base 16: mod_base = OTHER; note = cEt thymidine
accttctgcagggact

SEQ ID NO: 1075 - DNA, 16 bp, synthetic construct
  source 1..16: mol_type = other DNA
  modified_base 1: mod_base = OTHER; note = cEt thymidine 3'-phosphorothioate
  modified_base 2..3: mod_base = OTHER; note = cEt adenosine 3'-phosphorothioate
  modified_base 4: mod_base = OTHER; note = 2'-deoxyadenosine 3'-phosphorothioate
  modified_base 5..6: mod_base = OTHER; note = 5-methyl-2'-deoxycytidine 3'-phosphorothioate
  modified_base 7..8: mod_base = OTHER; note = 2'-deoxythymidine 3'-phosphorothioate
  modified_base 9: mod_base = OTHER; note = 5-methyl-2'-deoxycytidine 3'-phosphorothioate
  modified_base 10: mod_base = OTHER; note = 2'-deoxythymidine 3'-phosphorothioate
  modified_base 11: mod_base = OTHER; note = 2'-deoxyguanosine 3'-phosphorothioate
  modified_base 12: mod_base = OTHER; note = 5-methyl-2'-deoxycytidine 3'-phosphorothioate
  modified_base 13: mod_base = OTHER; note = 2'-deoxyadenosine 3'-phosphorothioate
  modified_base 14..15: mod_base = OTHER; note = cEt guanosine 3'-phosphorothioate
  modified_base 16: mod_base = OTHER; note = cEt guanosine
taaaccttctgcaggg

SEQ ID NO: 1076 - DNA, 16 bp, synthetic construct
  source 1..16: mol_type = other DNA
  modified_base 1: mod_base = OTHER; note = cEt guanosine 3'-phosphorothioate
  modified_base 2..3: mod_base = OTHER; note = cEt adenosine 3'-phosphorothioate
  modified_base 4..5: mod_base = OTHER; note = 2'-deoxyadenosine 3'-phosphorothioate
  modified_base 6: mod_base = OTHER; note = 2'-deoxyguanosine 3'-phosphorothioate
  modified_base 7..9: mod_base = OTHER; note = 5-methyl-2'-deoxycytidine 3'-phosphorothioate
  modified_base 10: mod_base = OTHER; note = 2'-deoxythymidine 3'-phosphorothioate
  modified_base 11: mod_base = OTHER; note = 2'-deoxyguanosine 3'-phosphorothioate
  modified_base 12..13: mod_base = OTHER; note = 5-methyl-2'-deoxycytidine 3'-phosphorothioate
  modified_base 14..15: mod_base = OTHER; note = cEt 5-methylcytidine 3'-phosphorothioate
  modified_base 16: mod_base = OTHER; note = cEt thymidine
gaaaagccctgcccct

SEQ ID NO: 1077 - DNA, 16 bp, synthetic construct
  source 1..16: mol_type = other DNA
  modified_base 1: mod_base = OTHER; note = cEt thymidine 3'-phosphorothioate
  modified_base 2: mod_base = OTHER; note = cEt adenosine 3'-phosphorothioate
  modified_base 3: mod_base = OTHER; note = cEt guanosine 3'-phosphorothioate
  modified_base 4: mod_base = OTHER; note = 2'-deoxyguanosine 3'-phosphorothioate
  modified_base 5..8: mod_base = OTHER; note = 2'-deoxyadenosine 3'-phosphorothioate
  modified_base 9: mod_base = OTHER; note = 2'-deoxyguanosine 3'-phosphorothioate
  modified_base 10..12: mod_base = OTHER; note = 5-methyl-2'-deoxycytidine 3'-phosphorothioate
  modified_base 13: mod_base = OTHER; note = 2'-deoxythymidine 3'-phosphorothioate
  modified_base 14: mod_base = OTHER; note = cEt guanosine 3'-phosphorothioate
  modified_base 15: mod_base = OTHER; note = cEt 5-methylcytidine 3'-phosphorothioate
  modified_base 16: mod_base = OTHER; note = cEt 5-methylcytidine
taggaaaagccctgcc

SEQ ID NO: 1078 - DNA, 16 bp, synthetic construct
  source 1..16: mol_type = other DNA
  modified_base 1: mod_base = OTHER; note = cEt 5-methylcytidine 3'-phosphorothioate
  modified_base 2..3: mod_base = OTHER; note = cEt thymidine 3'-phosphorothioate
  modified_base 4: mod_base = OTHER; note = 2'-deoxyadenosine 3'-phosphorothioate
  modified_base 5..6: mod_base = OTHER; note = 2'-deoxyguanosine 3'-phosphorothioate
  modified_base 7..10: mod_base = OTHER; note = 2'-deoxyadenosine 3'-phosphorothioate
  modified_base 11: mod_base = OTHER; note = 2'-deoxyguanosine 3'-phosphorothioate
  modified_base 12..13: mod_base = OTHER; note = 5-methyl-2'-deoxycytidine 3'-phosphorothioate
  modified_base 14: mod_base = OTHER; note = cEt 5-methylcytidine 3'-phosphorothioate
  modified_base 15: mod_base = OTHER; note = cEt thymidine 3'-phosphorothioate
  modified_base 16: mod_base = OTHER; note = cEt guanosine
cttaggaaaagccctg

SEQ ID NO: 1079 - DNA, 16 bp, synthetic construct
  source 1..16: mol_type = other DNA
  modified_base 1: mod_base = OTHER; note = cEt thymidine 3'-phosphorothioate
  modified_base 2: mod_base = OTHER; note = cEt guanosine 3'-phosphorothioate
  modified_base 3: mod_base = OTHER; note = cEt 5-methylcytidine 3'-phosphorothioate
  modified_base 4..5: mod_base = OTHER; note = 2'-deoxythymidine 3'-phosphorothioate
  modified_base 6: mod_base = OTHER; note = 2'-deoxyadenosine 3'-phosphorothioate
  modified_base 7..8: mod_base = OTHER; note = 2'-deoxyguanosine 3'-phosphorothioate
  modified_base 9..12: mod_base = OTHER; note = 2'-deoxyadenosine 3'-phosphorothioate
  modified_base 13: mod_base = OTHER; note = 2'-deoxyguanosine 3'-phosphorothioate
  modified_base 14..15: mod_base = OTHER; note = cEt 5-methylcytidine 3'-phosphorothioate
  modified_base 16: mod_base = OTHER; note = cEt 5-methylcytidine
tgcttaggaaaagccc

SEQ ID NO: 1080 - DNA, 16 bp, synthetic construct
  source 1..16: mol_type = other DNA
  modified_base 1: mod_base = OTHER; note = cEt thymidine 3'-phosphorothioate
  modified_base 3: mod_base = OTHER; note = cEt thymidine 3'-phosphorothioate
  modified_base 2: mod_base = OTHER; note = cEt 5-methylcytidine 3'-phosphorothioate
  modified_base 4: mod_base = OTHER; note = 2'-deoxyguanosine 3'-phosphorothioate
  modified_base 5: mod_base = OTHER; note = 5-methyl-2'-deoxycytidine 3'-phosphorothioate
  modified_base 6..7: mod_base = OTHER; note = 2'-deoxythymidine 3'-phosphorothioate
  modified_base 8: mod_base = OTHER; note = 2'-deoxyadenosine 3'-phosphorothioate
  modified_base 9..10: mod_base = OTHER; note = 2'-deoxyguanosine 3'-phosphorothioate
  modified_base 11..13: mod_base = OTHER; note = 2'-deoxyadenosine 3'-phosphorothioate
  modified_base 14: mod_base = OTHER; note = cEt adenosine 3'-phosphorothioate
  modified_base 15: mod_base = OTHER; note = cEt guanosine 3'-phosphorothioate
  modified_base 16: mod_base = OTHER; note = cEt 5-methylcytidine
tctgcttaggaaaagc

SEQ ID NO: 1081 - DNA, 16 bp, synthetic construct
  source 1..16: mol_type = other DNA
  modified_base 1: mod_base = OTHER; note = cEt 5-methylcytidine 3'-phosphorothioate
  modified_base 3: mod_base = OTHER; note = cEt 5-methylcytidine 3'-phosphorothioate
  modified_base 2: mod_base = OTHER; note = cEt thymidine 3'-phosphorothioate
  modified_base 4: mod_base = OTHER; note = 5-methyl-2'-deoxycytidine 3'-phosphorothioate
  modified_base 6: mod_base = OTHER; note = 5-methyl-2'-deoxycytidine 3'-phosphorothioate
  modified_base 5: mod_base = OTHER; note = 2'-deoxythymidine 3'-phosphorothioate
  modified_base 7: mod_base = OTHER; note = 2'-deoxythymidine 3'-phosphorothioate
  modified_base 8: mod_base = OTHER; note = 2'-deoxyguanosine 3'-phosphorothioate
  modified_base 9: mod_base = OTHER; note = 5-methyl-2'-deoxycytidine 3'-phosphorothioate
  modified_base 10..11: mod_base = OTHER; note = 2'-deoxythymidine 3'-phosphorothioate
  modified_base 12: mod_base = OTHER; note = 2'-deoxyadenosine 3'-phosphorothioate
  modified_base 13: mod_base = OTHER; note = 2'-deoxyguanosine 3'-phosphorothioate
  modified_base 14: mod_base = OTHER; note = cEt guanosine 3'-phosphorothioate
  modified_base 15: mod_base = OTHER; note = cEt adenosine 3'-phosphorothioate
  modified_base 16: mod_base = OTHER; note = cEt adenosine
ctcctctgcttaggaa

SEQ ID NO: 1082 - DNA, 16 bp, synthetic construct
  source 1..16: mol_type = other DNA
  modified_base 1..3: mod_base = OTHER; note = cEt 5-methylcytidine 3'-phosphorothioate
  modified_base 4: mod_base = OTHER; note = 2'-deoxythymidine 3'-phosphorothioate
  modified_base 5..6: mod_base = OTHER; note = 5-methyl-2'-deoxycytidine 3'-phosphorothioate
  modified_base 7: mod_base = OTHER; note = 2'-deoxythymidine 3'-phosphorothioate
  modified_base 8: mod_base = OTHER; note = 5-methyl-2'-deoxycytidine 3'-phosphorothioate
  modified_base 9: mod_base = OTHER; note = 2'-deoxythymidine 3'-phosphorothioate
  modified_base 10: mod_base = OTHER; note = 2'-deoxyguanosine 3'-phosphorothioate
  modified_base 11: mod_base = OTHER; note = 5-methyl-2'-deoxycytidine 3'-phosphorothioate
  modified_base 12..13: mod_base = OTHER; note = 2'-deoxythymidine 3'-phosphorothioate
  modified_base 14: mod_base = OTHER; note = cEt adenosine 3'-phosphorothioate
  modified_base 15: mod_base = OTHER; note = cEt guanosine 3'-phosphorothioate
  modified_base 16: mod_base = OTHER; note = cEt guanosine
ccctcctctgcttagg

SEQ ID NO: 1083 - DNA, 16 bp, synthetic construct
  source 1..16: mol_type = other DNA
  modified_base 1: mod_base = OTHER; note = cEt 5-methylcytidine 3'-phosphorothioate
  modified_base 2: mod_base = OTHER; note = cEt thymidine 3'-phosphorothioate
  modified_base 3: mod_base = OTHER; note = cEt guanosine 3'-phosphorothioate
  modified_base 4: mod_base = OTHER; note = 2'-deoxyadenosine 3'-phosphorothioate
  modified_base 5..7: mod_base = OTHER; note = 2'-deoxythymidine 3'-phosphorothioate
  modified_base 8: mod_base = OTHER; note = 2'-deoxyguanosine 3'-phosphorothioate
  modified_base 9: mod_base = OTHER; note = 2'-deoxyadenosine 3'-phosphorothioate
  modified_base 10..11: mod_base = OTHER; note = 2'-deoxyguanosine 3'-phosphorothioate
  modified_base 12..13: mod_base = OTHER; note = 2'-deoxyadenosine 3'-phosphorothioate
  modified_base 14..15: mod_base = OTHER; note = cEt guanosine 3'-phosphorothioate
  modified_base 16: mod_base = OTHER; note = cEt guanosine
ctgatttgaggaaggg

SEQ ID NO: 1084 - DNA, 16 bp, synthetic construct
  source 1..16: mol_type = other DNA
  modified_base 1: mod_base = OTHER; note = cEt thymidine 3'-phosphorothioate
  modified_base 2..3: mod_base = OTHER; note = cEt 5-methylcytidine 3'-phosphorothioate
  modified_base 4: mod_base = OTHER; note = 2'-deoxythymidine 3'-phosphorothioate
  modified_base 5: mod_base = OTHER; note = 2'-deoxyguanosine 3'-phosphorothioate
  modified_base 6: mod_base = OTHER; note = 2'-deoxyadenosine 3'-phosphorothioate
  modified_base 7..9: mod_base = OTHER; note = 2'-deoxythymidine 3'-phosphorothioate
  modified_base 10: mod_base = OTHER; note = 2'-deoxyguanosine 3'-phosphorothioate
  modified_base 11: mod_base = OTHER; note = 2'-deoxyadenosine 3'-phosphorothioate
  modified_base 12..13: mod_base = OTHER; note = 2'-deoxyguanosine 3'-phosphorothioate
  modified_base 14..15: mod_base = OTHER; note = cEt adenosine 3'-phosphorothioate
  modified_base 16: mod_base = OTHER; note = cEt guanosine
tcctgatttgaggaag

SEQ ID NO: 1085 - DNA, 16 bp, synthetic construct
  source 1..16: mol_type = other DNA
  modified_base 1..2: mod_base = OTHER; note = cEt 5-methylcytidine 3'-phosphorothioate
  modified_base 3: mod_base = OTHER; note = cEt thymidine 3'-phosphorothioate
  modified_base 4..5: mod_base = OTHER; note = 5-methyl-2'-deoxycytidine 3'-phosphorothioate
  modified_base 6: mod_base = OTHER; note = 2'-deoxythymidine 3'-phosphorothioate
  modified_base 7: mod_base = OTHER; note = 2'-deoxyguanosine 3'-phosphorothioate
  modified_base 8: mod_base = OTHER; note = 2'-deoxyadenosine 3'-phosphorothioate
  modified_base 9..11: mod_base = OTHER; note = 2'-deoxythymidine 3'-phosphorothioate
  modified_base 12: mod_base = OTHER; note = 2'-deoxyguanosine 3'-phosphorothioate
  modified_base 13: mod_base = OTHER; note = 2'-deoxyadenosine 3'-phosphorothioate
  modified_base 14..15: mod_base = OTHER; note = cEt guanosine 3'-phosphorothioate
  modified_base 16: mod_base = OTHER; note = cEt adenosine
cctcctgatttgagga

SEQ ID NO: 1086 - DNA, 16 bp, synthetic construct
  source 1..16: mol_type = other DNA
  modified_base 1: mod_base = OTHER; note = cEt guanosine 3'-phosphorothioate
  modified_base 2: mod_base = OTHER; note = cEt adenosine 3'-phosphorothioate
  modified_base 3: mod_base = OTHER; note = cEt 5-methylcytidine 3'-phosphorothioate
  modified_base 4: mod_base = OTHER; note = 5-methyl-2'-deoxycytidine 3'-phosphorothioate
  modified_base 5: mod_base = OTHER; note = 2'-deoxythymidine 3'-phosphorothioate
  modified_base 6..7: mod_base = OTHER; note = 5-methyl-2'-deoxycytidine 3'-phosphorothioate
  modified_base 8: mod_base = OTHER; note = 2'-deoxythymidine 3'-phosphorothioate
  modified_base 9: mod_base = OTHER; note = 2'-deoxyguanosine 3'-phosphorothioate
  modified_base 10: mod_base = OTHER; note = 2'-deoxyadenosine 3'-phosphorothioate
  modified_base 11..13: mod_base = OTHER; note = 2'-deoxythymidine 3'-phosphorothioate
  modified_base 14: mod_base = OTHER; note = cEt guanosine 3'-phosphorothioate
  modified_base 15: mod_base = OTHER; note = cEt adenosine 3'-phosphorothioate
  modified_base 16: mod_base = OTHER; note = cEt guanosine
gacctcctgatttgag

SEQ ID NO: 1087 - DNA, 16 bp, synthetic construct
  source 1..16: mol_type = other DNA
  modified_base 1..2: mod_base = OTHER; note = cEt adenosine 3'-phosphorothioate
  modified_base 3: mod_base = OTHER; note = cEt guanosine 3'-phosphorothioate
  modified_base 4: mod_base = OTHER; note = 2'-deoxyadenosine 3'-phosphorothioate
  modified_base 5..6: mod_base = OTHER; note = 5-methyl-2'-deoxycytidine 3'-phosphorothioate
  modified_base 7: mod_base = OTHER; note = 2'-deoxythymidine 3'-phosphorothioate
  modified_base 8..9: mod_base = OTHER; note = 5-methyl-2'-deoxycytidine 3'-phosphorothioate
  modified_base 10: mod_base = OTHER; note = 2'-deoxythymidine 3'-phosphorothioate
  modified_base 11: mod_base = OTHER; note = 2'-deoxyguanosine 3'-phosphorothioate
  modified_base 12: mod_base = OTHER; note = 2'-deoxyadenosine 3'-phosphorothioate
  modified_base 13: mod_base = OTHER; note = 2'-deoxythymidine 3'-phosphorothioate
  modified_base 14..15: mod_base = OTHER; note = cEt thymidine 3'-phosphorothioate
  modified_base 16: mod_base = OTHER; note = cEt guanosine
aagacctcctgatttg

SEQ ID NO: 1088 - DNA, 16 bp, synthetic construct
  source 1..16: mol_type = other DNA
  modified_base 1..2: mod_base = OTHER; note = cEt 5-methylcytidine 3'-phosphorothioate
  modified_base 3: mod_base = OTHER; note = cEt adenosine 3'-phosphorothioate
  modified_base 4: mod_base = OTHER; note = 2'-deoxyadenosine 3'-phosphorothioate
  modified_base 6: mod_base = OTHER; note = 2'-deoxyadenosine 3'-phosphorothioate
  modified_base 5: mod_base = OTHER; note = 2'-deoxyguanosine 3'-phosphorothioate
  modified_base 7..8: mod_base = OTHER; note = 5-methyl-2'-deoxycytidine 3'-phosphorothioate
  modified_base 9: mod_base = OTHER; note = 2'-deoxythymidine 3'-phosphorothioate
  modified_base 10..11: mod_base = OTHER; note = 5-methyl-2'-deoxycytidine 3'-phosphorothioate
  modified_base 12: mod_base = OTHER; note = 2'-deoxythymidine 3'-phosphorothioate
  modified_base 13: mod_base = OTHER; note = 2'-deoxyguanosine 3'-phosphorothioate
  modified_base 14: mod_base = OTHER; note = cEt adenosine 3'-phosphorothioate
  modified_base 15: mod_base = OTHER; note = cEt thymidine 3'-phosphorothioate
  modified_base 16: mod_base = OTHER; note = cEt thymidine
ccaagacctcctgatt

SEQ ID NO: 1089 - DNA, 16 bp, synthetic construct
  source 1..16: mol_type = other DNA
  modified_base 1: mod_base = OTHER; note = cEt 5-methylcytidine 3'-phosphorothioate
  modified_base 2: mod_base = OTHER; note = cEt thymidine 3'-phosphorothioate
  modified_base 3: mod_base = OTHER; note = cEt guanosine 3'-phosphorothioate
  modified_base 4: mod_base = OTHER; note = 5-methyl-2'-deoxycytidine 3'-phosphorothioate
  modified_base 5..6: mod_base = OTHER; note = 2'-deoxythymidine 3'-phosphorothioate
  modified_base 7..8: mod_base = OTHER; note = 5-methyl-2'-deoxycytidine 3'-phosphorothioate
  modified_base 9..10: mod_base = OTHER; note = 2'-deoxyadenosine 3'-phosphorothioate
  modified_base 11: mod_base = OTHER; note = 2'-deoxyguanosine 3'-phosphorothioate
  modified_base 12: mod_base = OTHER; note = 2'-deoxyadenosine 3'-phosphorothioate
  modified_base 13: mod_base = OTHER; note = 5-methyl-2'-deoxycytidine 3'-phosphorothioate
  modified_base 14: mod_base = OTHER; note = cEt 5-methylcytidine 3'-phosphorothioate
  modified_base 15: mod_base = OTHER; note = cEt thymidine 3'-phosphorothioate
  modified_base 16: mod_base = OTHER; note = cEt 5-methylcytidine
ctgcttccaagacctc

SEQ ID NO: 1090 - DNA, 16 bp, synthetic construct
  source 1..16: mol_type = other DNA
  modified_base 1: mod_base = OTHER; note = cEt adenosine 3'-phosphorothioate
  modified_base 2: mod_base = OTHER; note = cEt guanosine 3'-phosphorothioate
  modified_base 3: mod_base = OTHER; note = cEt 5-methylcytidine 3'-phosphorothioate
  modified_base 4: mod_base = OTHER; note = 2'-deoxythymidine 3'-phosphorothioate
  modified_base 5: mod_base = OTHER; note = 2'-deoxyguanosine 3'-phosphorothioate
  modified_base 6: mod_base = OTHER; note = 5-methyl-2'-deoxycytidine 3'-phosphorothioate
  modified_base 7..8: mod_base = OTHER; note = 2'-deoxythymidine 3'-phosphorothioate
  modified_base 9..10: mod_base = OTHER; note = 5-methyl-2'-deoxycytidine 3'-phosphorothioate
  modified_base 11..12: mod_base = OTHER; note = 2'-deoxyadenosine 3'-phosphorothioate
  modified_base 13: mod_base = OTHER; note = 2'-deoxyguanosine 3'-phosphorothioate
  modified_base 14: mod_base = OTHER; note = cEt adenosine 3'-phosphorothioate
  modified_base 15: mod_base = OTHER; note = cEt 5-methylcytidine 3'-phosphorothioate
  modified_base 16: mod_base = OTHER; note = cEt 5-methylcytidine
agctgcttccaagacc

SEQ ID NO: 1091 - DNA, 16 bp, synthetic construct
  source 1..16: mol_type = other DNA
  modified_base 1: mod_base = OTHER; note = cEt guanosine 3'-phosphorothioate
  modified_base 2: mod_base = OTHER; note = cEt 5-methylcytidine 3'-phosphorothioate
  modified_base 3: mod_base = OTHER; note = cEt adenosine 3'-phosphorothioate
  modified_base 4: mod_base = OTHER; note = 2'-deoxyguanosine 3'-phosphorothioate
  modified_base 5: mod_base = OTHER; note = 5-methyl-2'-deoxycytidine 3'-phosphorothioate
  modified_base 6: mod_base = OTHER; note = 2'-deoxythymidine 3'-phosphorothioate
  modified_base 7: mod_base = OTHER; note = 2'-deoxyguanosine 3'-phosphorothioate
  modified_base 8: mod_base = OTHER; note = 5-methyl-2'-deoxycytidine 3'-phosphorothioate
  modified_base 9..10: mod_base = OTHER; note = 2'-deoxythymidine 3'-phosphorothioate
  modified_base 11..12: mod_base = OTHER; note = 5-methyl-2'-deoxycytidine 3'-phosphorothioate
  modified_base 13: mod_base = OTHER; note = 2'-deoxyadenosine 3'-phosphorothioate
  modified_base 14: mod_base = OTHER; note = cEt adenosine 3'-phosphorothioate
  modified_base 15: mod_base = OTHER; note = cEt guanosine 3'-phosphorothioate
  modified_base 16: mod_base = OTHER; note = cEt adenosine
gcagctgcttccaaga

SEQ ID NO: 1092 - DNA, 16 bp, synthetic construct
  source 1..16: mol_type = other DNA
  modified_base 1: mod_base = OTHER; note = cEt 5-methylcytidine 3'-phosphorothioate
  modified_base 2: mod_base = OTHER; note = cEt thymidine 3'-phosphorothioate
  modified_base 3: mod_base = OTHER; note = cEt guanosine 3'-phosphorothioate
  modified_base 4: mod_base = OTHER; note = 2'-deoxyguanosine 3'-phosphorothioate
  modified_base 5: mod_base = OTHER; note = 2'-deoxythymidine 3'-phosphorothioate
  modified_base 6..7: mod_base = OTHER; note = 2'-deoxyguanosine 3'-phosphorothioate
  modified_base 8: mod_base = OTHER; note = 2'-deoxyadenosine 3'-phosphorothioate
  modified_base 9: mod_base = OTHER; note = 2'-deoxyguanosine 3'-phosphorothioate
  modified_base 10..11: mod_base = OTHER; note = 2'-deoxyadenosine 3'-phosphorothioate
  modified_base 12..13: mod_base = OTHER; note = 5-methyl-2'-deoxycytidine 3'-phosphorothioate
  modified_base 14: mod_base = OTHER; note = cEt adenosine 3'-phosphorothioate
  modified_base 15: mod_base = OTHER; note = cEt guanosine 3'-phosphorothioate
  modified_base 16: mod_base = OTHER; note = cEt adenosine
ctggtggagaaccaga

SEQ ID NO: 1093 - DNA, 16 bp, synthetic construct
  source 1..16: mol_type = other DNA
  modified_base 1: mod_base = OTHER; note = cEt 5-methylcytidine 3'-phosphorothioate
  modified_base 3: mod_base = OTHER; note = cEt 5-methylcytidine 3'-phosphorothioate
  modified_base 2: mod_base = OTHER; note = cEt thymidine 3'-phosphorothioate
  modified_base 4: mod_base = OTHER; note = 2'-deoxythymidine 3'-phosphorothioate
  modified_base 5..6: mod_base = OTHER; note = 2'-deoxyguanosine 3'-phosphorothioate
  modified_base 7: mod_base = OTHER; note = 2'-deoxythymidine 3'-phosphorothioate
  modified_base 8..9: mod_base = OTHER; note = 2'-deoxyguanosine 3'-phosphorothioate
  modified_base 10: mod_base = OTHER; note = 2'-deoxyadenosine 3'-phosphorothioate
  modified_base 11: mod_base = OTHER; note = 2'-deoxyguanosine 3'-phosphorothioate
  modified_base 12..13: mod_base = OTHER; note = 2'-deoxyadenosine 3'-phosphorothioate
  modified_base 14..15: mod_base = OTHER; note = cEt 5-methylcytidine 3'-phosphorothioate
  modified_base 16: mod_base = OTHER; note = cEt adenosine
ctctggtggagaacca

SEQ ID NO: 1094 - DNA, 16 bp, synthetic construct
  source 1..16: mol_type = other DNA
  modified_base 1..2: mod_base = OTHER; note = cEt thymidine 3'-phosphorothioate
  modified_base 3: mod_base = OTHER; note = cEt 5-methylcytidine 3'-phosphorothioate
  modified_base 4: mod_base = OTHER; note = 2'-deoxythymidine 3'-phosphorothioate
  modified_base 5: mod_base = OTHER; note = 5-methyl-2'-deoxycytidine 3'-phosphorothioate
  modified_base 6: mod_base = OTHER; note = 2'-deoxythymidine 3'-phosphorothioate
  modified_base 7..8: mod_base = OTHER; note = 2'-deoxyguanosine 3'-phosphorothioate
  modified_base 9: mod_base = OTHER; note = 2'-deoxythymidine 3'-phosphorothioate
  modified_base 10..11: mod_base = OTHER; note = 2'-deoxyguanosine 3'-phosphorothioate
  modified_base 12: mod_base = OTHER; note = 2'-deoxyadenosine 3'-phosphorothioate
  modified_base 13: mod_base = OTHER; note = 2'-deoxyguanosine 3'-phosphorothioate
  modified_base 14..15: mod_base = OTHER; note = cEt adenosine 3'-phosphorothioate
  modified_base 16: mod_base = OTHER; note = cEt 5-methylcytidine
ttctctggtggagaac

SEQ ID NO: 1095 - DNA, 16 bp, synthetic construct
  source 1..16: mol_type = other DNA
  modified_base 1: mod_base = OTHER; note = cEt guanosine 3'-phosphorothioate
  modified_base 2: mod_base = OTHER; note = cEt adenosine 3'-phosphorothioate
  modified_base 3: mod_base = OTHER; note = cEt thymidine 3'-phosphorothioate
  modified_base 4: mod_base = OTHER; note = 2'-deoxythymidine 3'-phosphorothioate
  modified_base 5: mod_base = OTHER; note = 5-methyl-2'-deoxycytidine 3'-phosphorothioate
  modified_base 6: mod_base = OTHER; note = 2'-deoxythymidine 3'-phosphorothioate
  modified_base 7: mod_base = OTHER; note = 5-methyl-2'-deoxycytidine 3'-phosphorothioate
  modified_base 8: mod_base = OTHER; note = 2'-deoxythymidine 3'-phosphorothioate
  modified_base 9..10: mod_base = OTHER; note = 2'-deoxyguanosine 3'-phosphorothioate
  modified_base 11: mod_base = OTHER; note = 2'-deoxythymidine 3'-phosphorothioate
  modified_base 12..13: mod_base = OTHER; note = 2'-deoxyguanosine 3'-phosphorothioate
  modified_base 14: mod_base = OTHER; note = cEt adenosine 3'-phosphorothioate
  modified_base 15: mod_base = OTHER; note = cEt guanosine 3'-phosphorothioate
  modified_base 16: mod_base = OTHER; note = cEt adenosine
gattctctggtggaga

SEQ ID NO: 1096 - DNA, 16 bp, synthetic construct
  source 1..16: mol_type = other DNA
  modified_base 1: mod_base = OTHER; note = cEt adenosine 3'-phosphorothioate
  modified_base 2: mod_base = OTHER; note = cEt 5-methylcytidine 3'-phosphorothioate
  modified_base 3: mod_base = OTHER; note = cEt thymidine 3'-phosphorothioate
  modified_base 4: mod_base = OTHER; note = 2'-deoxythymidine 3'-phosphorothioate
  modified_base 5: mod_base = OTHER; note = 2'-deoxyadenosine 3'-phosphorothioate
  modified_base 6: mod_base = OTHER; note = 5-methyl-2'-deoxycytidine 3'-phosphorothioate
  modified_base 7: mod_base = OTHER; note = 2'-deoxythymidine 3'-phosphorothioate
  modified_base 8: mod_base = OTHER; note = 2'-deoxyguanosine 3'-phosphorothioate
  modified_base 9..11: mod_base = OTHER; note = 2'-deoxythymidine 3'-phosphorothioate
  modified_base 12: mod_base = OTHER; note = 5-methyl-2'-deoxycytidine 3'-phosphorothioate
  modified_base 13: mod_base = OTHER; note = 2'-deoxyadenosine 3'-phosphorothioate
  modified_base 14: mod_base = OTHER; note = cEt thymidine 3'-phosphorothioate
  modified_base 15: mod_base = OTHER; note = cEt 5-methylcytidine 3'-phosphorothioate
  modified_base 16: mod_base = OTHER; note = cEt 5-methylcytidine
acttactgtttcatcc

SEQ ID NO: 1097 - DNA, 16 bp, synthetic construct
  source 1..16: mol_type = other DNA
  modified_base 1: mod_base = OTHER; note = cEt 5-methylcytidine 3'-phosphorothioate
  modified_base 2..3: mod_base = OTHER; note = cEt guanosine 3'-phosphorothioate
  modified_base 4: mod_base = OTHER; note = 2'-deoxyadenosine 3'-phosphorothioate
  modified_base 5..9: mod_base = OTHER; note = 5-methyl-2'-deoxycytidine 3'-phosphorothioate
  modified_base 10: mod_base = OTHER; note = 2'-deoxythymidine 3'-phosphorothioate
  modified_base 11..13: mod_base = OTHER; note = 5-methyl-2'-deoxycytidine 3'-phosphorothioate
  modified_base 14: mod_base = OTHER; note = cEt 5-methylcytidine 3'-phosphorothioate
  modified_base 15: mod_base = OTHER; note = cEt thymidine 3'-phosphorothioate
  modified_base 16: mod_base = OTHER; note = cEt 5-methylcytidine
cggaccccctcccctc

SEQ ID NO: 1098 - DNA, 16 bp, synthetic construct
  source 1..16: mol_type = other DNA
  modified_base 1: mod_base = OTHER; note = cEt guanosine 3'-phosphorothioate
  modified_base 2: mod_base = OTHER; note = cEt adenosine 3'-phosphorothioate
  modified_base 3: mod_base = OTHER; note = cEt 5-methylcytidine 3'-phosphorothioate
  modified_base 4..5: mod_base = OTHER; note = 2'-deoxyguanosine 3'-phosphorothioate
  modified_base 6: mod_base = OTHER; note = 2'-deoxyadenosine 3'-phosphorothioate
  modified_base 7..11: mod_base = OTHER; note = 5-methyl-2'-deoxycytidine 3'-phosphorothioate
  modified_base 13: mod_base = OTHER; note = 5-methyl-2'-deoxycytidine 3'-phosphorothioate
  modified_base 12: mod_base = OTHER; note = 2'-deoxythymidine 3'-phosphorothioate
  modified_base 14..15: mod_base = OTHER; note = cEt 5-methylcytidine 3'-phosphorothioate
  modified_base 16: mod_base = OTHER; note = cEt 5-methylcytidine
gacggaccccctcccc

SEQ ID NO: 1099 - DNA, 16 bp, synthetic construct
  source 1..16: mol_type = other DNA
  modified_base 1: mod_base = OTHER; note = cEt 5-methylcytidine 3'-phosphorothioate
  modified_base 2: mod_base = OTHER; note = cEt thymidine 3'-phosphorothioate
  modified_base 3: mod_base = OTHER; note = cEt guanosine 3'-phosphorothioate
  modified_base 4: mod_base = OTHER; note = 2'-deoxyadenosine 3'-phosphorothioate
  modified_base 5: mod_base = OTHER; note = 5-methyl-2'-deoxycytidine 3'-phosphorothioate
  modified_base 6..7: mod_base = OTHER; note = 2'-deoxyguanosine 3'-phosphorothioate
  modified_base 8: mod_base = OTHER; note = 2'-deoxyadenosine 3'-phosphorothioate
  modified_base 9..13: mod_base = OTHER; note = 5-methyl-2'-deoxycytidine 3'-phosphorothioate
  modified_base 14: mod_base = OTHER; note = cEt thymidine 3'-phosphorothioate
  modified_base 15: mod_base = OTHER; note = cEt 5-methylcytidine 3'-phosphorothioate
  modified_base 16: mod_base = OTHER; note = cEt 5-methylcytidine
ctgacggaccccctcc

SEQ ID NO: 1100 - DNA, 16 bp, synthetic construct
  source 1..16: mol_type = other DNA
  modified_base 1..3: mod_base = OTHER; note = cEt 5-methylcytidine 3'-phosphorothioate
  modified_base 4: mod_base = OTHER; note = 2'-deoxythymidine 3'-phosphorothioate
  modified_base 5: mod_base = OTHER; note = 2'-deoxyguanosine 3'-phosphorothioate
  modified_base 6: mod_base = OTHER; note = 2'-deoxyadenosine 3'-phosphorothioate
  modified_base 7: mod_base = OTHER; note = 5-methyl-2'-deoxycytidine 3'-phosphorothioate
  modified_base 8..9: mod_base = OTHER; note = 2'-deoxyguanosine 3'-phosphorothioate
  modified_base 10: mod_base = OTHER; note = 2'-deoxyadenosine 3'-phosphorothioate
  modified_base 11..13: mod_base = OTHER; note = 5-methyl-2'-deoxycytidine 3'-phosphorothioate
  modified_base 14..15: mod_base = OTHER; note = cEt 5-methylcytidine 3'-phosphorothioate
  modified_base 16: mod_base = OTHER; note = cEt thymidine
ccctgacggaccccct

SEQ ID NO: 1101 - DNA, 16 bp, synthetic construct
  source 1..16: mol_type = other DNA
  modified_base 1..2: mod_base = OTHER; note = cEt adenosine 3'-phosphorothioate
  modified_base 3: mod_base = OTHER; note = cEt guanosine 3'-phosphorothioate
  modified_base 4..6: mod_base = OTHER; note = 5-methyl-2'-deoxycytidine 3'-phosphorothioate
  modified_base 7: mod_base = OTHER; note = 2'-deoxythymidine 3'-phosphorothioate
  modified_base 8: mod_base = OTHER; note = 5-methyl-2'-deoxycytidine 3'-phosphorothioate
  modified_base 9: mod_base = OTHER; note = 2'-deoxyadenosine 3'-phosphorothioate
  modified_base 10..11: mod_base = OTHER; note = 5-methyl-2'-deoxycytidine 3'-phosphorothioate
  modified_base 12..13: mod_base = OTHER; note = 2'-deoxythymidine 3'-phosphorothioate
  modified_base 14..15: mod_base = OTHER; note = cEt thymidine 3'-phosphorothioate
  modified_base 16: mod_base = OTHER; note = cEt 5-methylcytidine
aagccctcaccttttc

SEQ ID NO: 1102 - DNA, 16 bp, synthetic construct
  source 1..16: mol_type = other DNA
  modified_base 1..2: mod_base = OTHER; note = cEt guanosine 3'-phosphorothioate
  modified_base 3: mod_base = OTHER; note = cEt adenosine 3'-phosphorothioate
  modified_base 4: mod_base = OTHER; note = 2'-deoxyadenosine 3'-phosphorothioate
  modified_base 5: mod_base = OTHER; note = 2'-deoxyguanosine 3'-phosphorothioate
  modified_base 6..8: mod_base = OTHER; note = 5-methyl-2'-deoxycytidine 3'-phosphorothioate
  modified_base 9: mod_base = OTHER; note = 2'-deoxythymidine 3'-phosphorothioate
  modified_base 10: mod_base = OTHER; note = 5-methyl-2'-deoxycytidine 3'-phosphorothioate
  modified_base 11: mod_base = OTHER; note = 2'-deoxyadenosine 3'-phosphorothioate
  modified_base 12..13: mod_base = OTHER; note = 5-methyl-2'-deoxycytidine 3'-phosphorothioate
  modified_base 14..15: mod_base = OTHER; note = cEt thymidine 3'-phosphorothioate
  modified_base 16: mod_base = OTHER; note = cEt thymidine
ggaagccctcaccttt

SEQ ID NO: 1103 - DNA, 16 bp, synthetic construct
  source 1..16: mol_type = other DNA
  modified_base 1: mod_base = OTHER; note = cEt 5-methylcytidine 3'-phosphorothioate
  modified_base 2..3: mod_base = OTHER; note = cEt guanosine 3'-phosphorothioate
  modified_base 4: mod_base = OTHER; note = 2'-deoxyguanosine 3'-phosphorothioate
  modified_base 5..6: mod_base = OTHER; note = 2'-deoxyadenosine 3'-phosphorothioate
  modified_base 7: mod_base = OTHER; note = 2'-deoxyguanosine 3'-phosphorothioate
  modified_base 8..10: mod_base = OTHER; note = 5-methyl-2'-deoxycytidine 3'-phosphorothioate
  modified_base 11: mod_base = OTHER; note = 2'-deoxythymidine 3'-phosphorothioate
  modified_base 12: mod_base = OTHER; note = 5-methyl-2'-deoxycytidine 3'-phosphorothioate
  modified_base 13: mod_base = OTHER; note = 2'-deoxyadenosine 3'-phosphorothioate
  modified_base 14..15: mod_base = OTHER; note = cEt 5-methylcytidine 3'-phosphorothioate
  modified_base 16: mod_base = OTHER; note = cEt thymidine
cgggaagccctcacct

SEQ ID NO: 1104 - DNA, 16 bp, synthetic construct
  source 1..16: mol_type = other DNA
  modified_base 1..3: mod_base = OTHER; note = cEt 5-methylcytidine 3'-phosphorothioate
  modified_base 4..6: mod_base = OTHER; note = 2'-deoxyguanosine 3'-phosphorothioate
  modified_base 7..8: mod_base = OTHER; note = 2'-deoxyadenosine 3'-phosphorothioate
  modified_base 9: mod_base = OTHER; note = 2'-deoxyguanosine 3'-phosphorothioate
  modified_base 10..12: mod_base = OTHER; note = 5-methyl-2'-deoxycytidine 3'-phosphorothioate
  modified_base 13: mod_base = OTHER; note = 2'-deoxythymidine 3'-phosphorothioate
  modified_base 14: mod_base = OTHER; note = cEt 5-methylcytidine 3'-phosphorothioate
  modified_base 15: mod_base = OTHER; note = cEt adenosine 3'-phosphorothioate
  modified_base 16: mod_base = OTHER; note = cEt 5-methylcytidine
cccgggaagccctcac

SEQ ID NO: 1105 - DNA, 16 bp, synthetic construct
  source 1..16: mol_type = other DNA
  modified_base 1: mod_base = OTHER; note = cEt 5-methylcytidine 3'-phosphorothioate
  modified_base 3: mod_base = OTHER; note = cEt 5-methylcytidine 3'-phosphorothioate
  modified_base 2: mod_base = OTHER; note = cEt adenosine 3'-phosphorothioate
  modified_base 4..5: mod_base = OTHER; note = 5-methyl-2'-deoxycytidine 3'-phosphorothioate
  modified_base 6..8: mod_base = OTHER; note = 2'-deoxyguanosine 3'-phosphorothioate
  modified_base 9..10: mod_base = OTHER; note = 2'-deoxyadenosine 3'-phosphorothioate
  modified_base 11: mod_base = OTHER; note = 2'-deoxyguanosine 3'-phosphorothioate
  modified_base 12..13: mod_base = OTHER; note = 5-methyl-2'-deoxycytidine 3'-phosphorothioate
  modified_base 14: mod_base = OTHER; note = cEt 5-methylcytidine 3'-phosphorothioate
  modified_base 15: mod_base = OTHER; note = cEt thymidine 3'-phosphorothioate
  modified_base 16: mod_base = OTHER; note = cEt 5-methylcytidine
cacccgggaagccctc

SEQ ID NO: 1106 - DNA, 16 bp, synthetic construct
  source 1..16: mol_type = other DNA
  modified_base 1: mod_base = OTHER; note = cEt guanosine 3'-phosphorothioate
  modified_base 2..3: mod_base = OTHER; note = cEt 5-methylcytidine 3'-phosphorothioate
  modified_base 4: mod_base = OTHER; note = 2'-deoxyadenosine 3'-phosphorothioate
  modified_base 5..7: mod_base = OTHER; note = 5-methyl-2'-deoxycytidine 3'-phosphorothioate
  modified_base 8..10: mod_base = OTHER; note = 2'-deoxyguanosine 3'-phosphorothioate
  modified_base 11..12: mod_base = OTHER; note = 2'-deoxyadenosine 3'-phosphorothioate
  modified_base 13: mod_base = OTHER; note = 2'-deoxyguanosine 3'-phosphorothioate
  modified_base 14..15: mod_base = OTHER; note = cEt 5-methylcytidine 3'-phosphorothioate
  modified_base 16: mod_base = OTHER; note = cEt 5-methylcytidine
gccacccgggaagccc

SEQ ID NO: 1107 - DNA, 16 bp, synthetic construct
  source 1..16: mol_type = other DNA
  modified_base 1: mod_base = OTHER; note = cEt adenosine 3'-phosphorothioate
  modified_base 2: mod_base = OTHER; note = cEt 5-methylcytidine 3'-phosphorothioate
  modified_base 3: mod_base = OTHER; note = cEt guanosine 3'-phosphorothioate
  modified_base 4..5: mod_base = OTHER; note = 5-methyl-2'-deoxycytidine 3'-phosphorothioate
  modified_base 6: mod_base = OTHER; note = 2'-deoxyadenosine 3'-phosphorothioate
  modified_base 7..9: mod_base = OTHER; note = 5-methyl-2'-deoxycytidine 3'-phosphorothioate
  modified_base 10..12: mod_base = OTHER; note = 2'-deoxyguanosine 3'-phosphorothioate
  modified_base 13: mod_base = OTHER; note = 2'-deoxyadenosine 3'-phosphorothioate
  modified_base 14: mod_base = OTHER; note = cEt adenosine 3'-phosphorothioate
  modified_base 15: mod_base = OTHER; note = cEt guanosine 3'-phosphorothioate
  modified_base 16: mod_base = OTHER; note = cEt 5-methylcytidine
acgccacccgggaagc

SEQ ID NO: 1108 - DNA, 16 bp, synthetic construct
  source 1..16: mol_type = other DNA
  modified_base 1: mod_base = OTHER; note = cEt 5-methylcytidine 3'-phosphorothioate
  modified_base 2: mod_base = OTHER; note = cEt thymidine 3'-phosphorothioate
  modified_base 3: mod_base = OTHER; note = cEt guanosine 3'-phosphorothioate
  modified_base 4..5: mod_base = OTHER; note = 2'-deoxythymidine 3'-phosphorothioate
  modified_base 6: mod_base = OTHER; note = 5-methyl-2'-deoxycytidine 3'-phosphorothioate
  modified_base 7: mod_base = OTHER; note = 2'-deoxyadenosine 3'-phosphorothioate
  modified_base 8..9: mod_base = OTHER; note = 2'-deoxyguanosine 3'-phosphorothioate
  modified_base 10..11: mod_base = OTHER; note = 2'-deoxyadenosine 3'-phosphorothioate
  modified_base 12: mod_base = OTHER; note = 2'-deoxyguanosine 3'-phosphorothioate
  modified_base 13: mod_base = OTHER; note = 2'-deoxythymidine 3'-phosphorothioate
  modified_base 14..15: mod_base = OTHER; note = cEt 5-methylcytidine 3'-phosphorothioate
  modified_base 16: mod_base = OTHER; note = cEt 5-methylcytidine
ctgttcaggaagtccc

SEQ ID NO: 1109 - DNA, 16 bp, synthetic construct
  source 1..16: mol_type = other DNA
  modified_base 1..2: mod_base = OTHER; note = cEt thymidine 3'-phosphorothioate
  modified_base 3: mod_base = OTHER; note = cEt 5-methylcytidine 3'-phosphorothioate
  modified_base 4: mod_base = OTHER; note = 2'-deoxythymidine 3'-phosphorothioate
  modified_base 5: mod_base = OTHER; note = 2'-deoxyguanosine 3'-phosphorothioate
  modified_base 6..7: mod_base = OTHER; note = 2'-deoxythymidine 3'-phosphorothioate
  modified_base 8: mod_base = OTHER; note = 5-methyl-2'-deoxycytidine 3'-phosphorothioate
  modified_base 9: mod_base = OTHER; note = 2'-deoxyadenosine 3'-phosphorothioate
  modified_base 10..11: mod_base = OTHER; note = 2'-deoxyguanosine 3'-phosphorothioate
  modified_base 12..13: mod_base = OTHER; note = 2'-deoxyadenosine 3'-phosphorothioate
  modified_base 14: mod_base = OTHER; note = cEt guanosine 3'-phosphorothioate
  modified_base 15: mod_base = OTHER; note = cEt thymidine 3'-phosphorothioate
  modified_base 16: mod_base = OTHER; note = cEt 5-methylcytidine
ttctgttcaggaagtc

SEQ ID NO: 1110 - DNA, 16 bp, synthetic construct
  source 1..16: mol_type = other DNA
  modified_base 1: mod_base = OTHER; note = cEt guanosine 3'-phosphorothioate
  modified_base 2: mod_base = OTHER; note = cEt 5-methylcytidine 3'-phosphorothioate
  modified_base 3: mod_base = OTHER; note = cEt thymidine 3'-phosphorothioate
  modified_base 4: mod_base = OTHER; note = 2'-deoxythymidine 3'-phosphorothioate
  modified_base 5: mod_base = OTHER; note = 5-methyl-2'-deoxycytidine 3'-phosphorothioate
  modified_base 6: mod_base = OTHER; note = 2'-deoxythymidine 3'-phosphorothioate
  modified_base 7: mod_base = OTHER; note = 2'-deoxyguanosine 3'-phosphorothioate
  modified_base 8..9: mod_base = OTHER; note = 2'-deoxythymidine 3'-phosphorothioate
  modified_base 10: mod_base = OTHER; note = 5-methyl-2'-deoxycytidine 3'-phosphorothioate
  modified_base 11: mod_base = OTHER; note = 2'-deoxyadenosine 3'-phosphorothioate
  modified_base 12..13: mod_base = OTHER; note = 2'-deoxyguanosine 3'-phosphorothioate
  modified_base 14..15: mod_base = OTHER; note = cEt adenosine 3'-phosphorothioate
  modified_base 16: mod_base = OTHER; note = cEt guanosine
gcttctgttcaggaag

SEQ ID NO: 1111 - DNA, 16 bp, synthetic construct
  source 1..16: mol_type = other DNA
  modified_base 1: mod_base = OTHER; note = cEt guanosine 3'-phosphorothioate
  modified_base 2: mod_base = OTHER; note = cEt 5-methylcytidine 3'-phosphorothioate
  modified_base 3: mod_base = OTHER; note = cEt thymidine 3'-phosphorothioate
  modified_base 4: mod_base = OTHER; note = 2'-deoxythymidine 3'-phosphorothioate
  modified_base 5..7: mod_base = OTHER; note = 2'-deoxyguanosine 3'-phosphorothioate
  modified_base 8..10: mod_base = OTHER; note = 5-methyl-2'-deoxycytidine 3'-phosphorothioate
  modified_base 11: mod_base = OTHER; note = 2'-deoxyadenosine 3'-phosphorothioate
  modified_base 12..13: mod_base = OTHER; note = 5-methyl-2'-deoxycytidine 3'-phosphorothioate
  modified_base 14..15: mod_base = OTHER; note = cEt 5-methylcytidine 3'-phosphorothioate
  modified_base 16: mod_base = OTHER; note = cEt thymidine
gcttgggcccacccct

SEQ ID NO: 1112 - DNA, 16 bp, synthetic construct
  source 1..16: mol_type = other DNA
  modified_base 1: mod_base = OTHER; note = cEt adenosine 3'-phosphorothioate
  modified_base 2..3: mod_base = OTHER; note = cEt guanosine 3'-phosphorothioate
  modified_base 4: mod_base = OTHER; note = 5-methyl-2'-deoxycytidine 3'-phosphorothioate
  modified_base 5..6: mod_base = OTHER; note = 2'-deoxythymidine 3'-phosphorothioate
  modified_base 7..9: mod_base = OTHER; note = 2'-deoxyguanosine 3'-phosphorothioate
  modified_base 10..12: mod_base = OTHER; note = 5-methyl-2'-deoxycytidine 3'-phosphorothioate
  modified_base 13: mod_base = OTHER; note = 2'-deoxyadenosine 3'-phosphorothioate
  modified_base 14..15: mod_base = OTHER; note = cEt 5-methylcytidine 3'-phosphorothioate
  modified_base 16: mod_base = OTHER; note = cEt 5-methylcytidine
aggcttgggcccaccc

SEQ ID NO: 1113 - DNA, 16 bp, synthetic construct
  source 1..16: mol_type = other DNA
  modified_base 1: mod_base = OTHER; note = cEt 5-methylcytidine 3'-phosphorothioate
  modified_base 2: mod_base = OTHER; note = cEt guanosine 3'-phosphorothioate
  modified_base 3: mod_base = OTHER; note = cEt adenosine 3'-phosphorothioate
  modified_base 4..5: mod_base = OTHER; note = 2'-deoxyguanosine 3'-phosphorothioate
  modified_base 6: mod_base = OTHER; note = 5-methyl-2'-deoxycytidine 3'-phosphorothioate
  modified_base 7..8: mod_base = OTHER; note = 2'-deoxythymidine 3'-phosphorothioate
  modified_base 9..11: mod_base = OTHER; note = 2'-deoxyguanosine 3'-phosphorothioate
  modified_base 12..13: mod_base = OTHER; note = 5-methyl-2'-deoxycytidine 3'-phosphorothioate
  modified_base 14: mod_base = OTHER; note = cEt 5-methylcytidine 3'-phosphorothioate
  modified_base 15: mod_base = OTHER; note = cEt adenosine 3'-phosphorothioate
  modified_base 16: mod_base = OTHER; note = cEt 5-methylcytidine
cgaggcttgggcccac

SEQ ID NO: 1114 - DNA, 16 bp, synthetic construct
  source 1..16: mol_type = other DNA
  modified_base 1: mod_base = OTHER; note = cEt adenosine 3'-phosphorothioate
  modified_base 2: mod_base = OTHER; note = cEt guanosine 3'-phosphorothioate
  modified_base 3: mod_base = OTHER; note = cEt 5-methylcytidine 3'-phosphorothioate
  modified_base 4: mod_base = OTHER; note = 2'-deoxyguanosine 3'-phosphorothioate
  modified_base 5: mod_base = OTHER; note = 2'-deoxyadenosine 3'-phosphorothioate
  modified_base 6..7: mod_base = OTHER; note = 2'-deoxyguanosine 3'-phosphorothioate
  modified_base 8: mod_base = OTHER; note = 5-methyl-2'-deoxycytidine 3'-phosphorothioate
  modified_base 9..10: mod_base = OTHER; note = 2'-deoxythymidine 3'-phosphorothioate
  modified_base 11..13: mod_base = OTHER; note = 2'-deoxyguanosine 3'-phosphorothioate
  modified_base 14..15: mod_base = OTHER; note = cEt 5-methylcytidine 3'-phosphorothioate
  modified_base 16: mod_base = OTHER; note = cEt 5-methylcytidine
agcgaggcttgggccc

SEQ ID NO: 1115 - DNA, 16 bp, synthetic construct
  source 1..16: mol_type = other DNA
  modified_base 1: mod_base = OTHER; note = cEt adenosine 3'-phosphorothioate
  modified_base 3: mod_base = OTHER; note = cEt adenosine 3'-phosphorothioate
  modified_base 2: mod_base = OTHER; note = cEt guanosine 3'-phosphorothioate
  modified_base 4: mod_base = OTHER; note = 2'-deoxyguanosine 3'-phosphorothioate
  modified_base 5: mod_base = OTHER; note = 5-methyl-2'-deoxycytidine 3'-phosphorothioate
  modified_base 6: mod_base = OTHER; note = 2'-deoxyguanosine 3'-phosphorothioate
  modified_base 7: mod_base = OTHER; note = 2'-deoxyadenosine 3'-phosphorothioate
  modified_base 8..9: mod_base = OTHER; note = 2'-deoxyguanosine 3'-phosphorothioate
  modified_base 10: mod_base = OTHER; note = 5-methyl-2'-deoxycytidine 3'-phosphorothioate
  modified_base 11..12: mod_base = OTHER; note = 2'-deoxythymidine 3'-phosphorothioate
  modified_base 13: mod_base = OTHER; note = 2'-deoxyguanosine 3'-phosphorothioate
  modified_base 14..15: mod_base = OTHER; note = cEt guanosine 3'-phosphorothioate
  modified_base 16: mod_base = OTHER; note = cEt 5-methylcytidine
agagcgaggcttgggc

SEQ ID NO: 1116 - DNA, 16 bp, synthetic construct
  source 1..16: mol_type = other DNA
  modified_base 1: mod_base = OTHER; note = cEt guanosine 3'-phosphorothioate
  modified_base 2: mod_base = OTHER; note = cEt 5-methylcytidine 3'-phosphorothioate
  modified_base 3: mod_base = OTHER; note = cEt adenosine 3'-phosphorothioate
  modified_base 4: mod_base = OTHER; note = 2'-deoxyguanosine 3'-phosphorothioate
  modified_base 5: mod_base = OTHER; note = 2'-deoxyadenosine 3'-phosphorothioate
  modified_base 6: mod_base = OTHER; note = 2'-deoxyguanosine 3'-phosphorothioate
  modified_base 7: mod_base = OTHER; note = 5-methyl-2'-deoxycytidine 3'-phosphorothioate
  modified_base 8: mod_base = OTHER; note = 2'-deoxyguanosine 3'-phosphorothioate
  modified_base 9: mod_base = OTHER; note = 2'-deoxyadenosine 3'-phosphorothioate
  modified_base 10..11: mod_base = OTHER; note = 2'-deoxyguanosine 3'-phosphorothioate
  modified_base 12: mod_base = OTHER; note = 5-methyl-2'-deoxycytidine 3'-phosphorothioate
  modified_base 13: mod_base = OTHER; note = 2'-deoxythymidine 3'-phosphorothioate
  modified_base 14: mod_base = OTHER; note = cEt thymidine 3'-phosphorothioate
  modified_base 15: mod_base = OTHER; note = cEt guanosine 3'-phosphorothioate
  modified_base 16: mod_base = OTHER; note = cEt guanosine
gcagagcgaggcttgg

SEQ ID NO: 1117 - DNA, 16 bp, synthetic construct
  source 1..16: mol_type = other DNA
  modified_base 1: mod_base = OTHER; note = cEt guanosine 3'-phosphorothioate
  modified_base 2: mod_base = OTHER; note = cEt adenosine 3'-phosphorothioate
  modified_base 3: mod_base = OTHER; note = cEt guanosine 3'-phosphorothioate
  modified_base 4: mod_base = OTHER; note = 5-methyl-2'-deoxycytidine 3'-phosphorothioate
  modified_base 5: mod_base = OTHER; note = 2'-deoxyadenosine 3'-phosphorothioate
  modified_base 7: mod_base = OTHER; note = 2'-deoxyadenosine 3'-phosphorothioate
  modified_base 6: mod_base = OTHER; note = 2'-deoxyguanosine 3'-phosphorothioate
  modified_base 8: mod_base = OTHER; note = 2'-deoxyguanosine 3'-phosphorothioate
  modified_base 9: mod_base = OTHER; note = 5-methyl-2'-deoxycytidine 3'-phosphorothioate
  modified_base 10: mod_base = OTHER; note = 2'-deoxyguanosine 3'-phosphorothioate
  modified_base 11: mod_base = OTHER; note = 2'-deoxyadenosine 3'-phosphorothioate
  modified_base 12..13: mod_base = OTHER; note = 2'-deoxyguanosine 3'-phosphorothioate
  modified_base 14: mod_base = OTHER; note = cEt 5-methylcytidine 3'-phosphorothioate
  modified_base 15: mod_base = OTHER; note = cEt thymidine 3'-phosphorothioate
  modified_base 16: mod_base = OTHER; note = cEt thymidine
gagcagagcgaggctt

SEQ ID NO: 1118 - DNA, 16 bp, synthetic construct
  source 1..16: mol_type = other DNA
  modified_base 1..3: mod_base = OTHER; note = cEt adenosine 3'-phosphorothioate
  modified_base 4..5: mod_base = OTHER; note = 2'-deoxyguanosine 3'-phosphorothioate
  modified_base 6: mod_base = OTHER; note = 2'-deoxyadenosine 3'-phosphorothioate
  modified_base 7: mod_base = OTHER; note = 2'-deoxyguanosine 3'-phosphorothioate
  modified_base 8: mod_base = OTHER; note = 5-methyl-2'-deoxycytidine 3'-phosphorothioate
  modified_base 9: mod_base = OTHER; note = 2'-deoxyadenosine 3'-phosphorothioate
  modified_base 10: mod_base = OTHER; note = 2'-deoxyguanosine 3'-phosphorothioate
  modified_base 11: mod_base = OTHER; note = 2'-deoxyadenosine 3'-phosphorothioate
  modified_base 12: mod_base = OTHER; note = 2'-deoxyguanosine 3'-phosphorothioate
  modified_base 13: mod_base = OTHER; note = 5-methyl-2'-deoxycytidine 3'-phosphorothioate
  modified_base 14: mod_base = OTHER; note = cEt guanosine 3'-phosphorothioate
  modified_base 15: mod_base = OTHER; note = cEt adenosine 3'-phosphorothioate
  modified_base 16: mod_base = OTHER; note = cEt guanosine
aaaggagcagagcgag

SEQ ID NO: 1119 - DNA, 16 bp, synthetic construct
  source 1..16: mol_type = other DNA
  modified_base 1: mod_base = OTHER; note = cEt 5-methylcytidine 3'-phosphorothioate
  modified_base 2..3: mod_base = OTHER; note = cEt adenosine 3'-phosphorothioate
  modified_base 4..5: mod_base = OTHER; note = 2'-deoxyadenosine 3'-phosphorothioate
  modified_base 6..7: mod_base = OTHER; note = 2'-deoxyguanosine 3'-phosphorothioate
  modified_base 8: mod_base = OTHER; note = 2'-deoxyadenosine 3'-phosphorothioate
  modified_base 9: mod_base = OTHER; note = 2'-deoxyguanosine 3'-phosphorothioate
  modified_base 10: mod_base = OTHER; note = 5-methyl-2'-deoxycytidine 3'-phosphorothioate
  modified_base 11: mod_base = OTHER; note = 2'-deoxyadenosine 3'-phosphorothioate
  modified_base 12: mod_base = OTHER; note = 2'-deoxyguanosine 3'-phosphorothioate
  modified_base 13: mod_base = OTHER; note = 2'-deoxyadenosine 3'-phosphorothioate
  modified_base 14: mod_base = OTHER; note = cEt guanosine 3'-phosphorothioate
  modified_base 15: mod_base = OTHER; note = cEt 5-methylcytidine 3'-phosphorothioate
  modified_base 16: mod_base = OTHER; note = cEt guanosine
caaaaggagcagagcg

SEQ ID NO: 1120 - DNA, 16 bp, synthetic construct
  source 1..16: mol_type = other DNA
  modified_base 1: mod_base = OTHER; note = cEt thymidine 3'-phosphorothioate
  modified_base 2..3: mod_base = OTHER; note = cEt guanosine 3'-phosphorothioate
  modified_base 4: mod_base = OTHER; note = 2'-deoxyadenosine 3'-phosphorothioate
  modified_base 5..6: mod_base = OTHER; note = 5-methyl-2'-deoxycytidine 3'-phosphorothioate
  modified_base 7..10: mod_base = OTHER; note = 2'-deoxyadenosine 3'-phosphorothioate
  modified_base 11..12: mod_base = OTHER; note = 2'-deoxyguanosine 3'-phosphorothioate
  modified_base 13: mod_base = OTHER; note = 2'-deoxyadenosine 3'-phosphorothioate
  modified_base 14: mod_base = OTHER; note = cEt guanosine 3'-phosphorothioate
  modified_base 15: mod_base = OTHER; note = cEt 5-methylcytidine 3'-phosphorothioate
  modified_base 16: mod_base = OTHER; note = cEt adenosine
tggaccaaaaggagca

SEQ ID NO: 1121 - DNA, 16 bp, synthetic construct
  source 1..16: mol_type = other DNA
  modified_base 1..2: mod_base = OTHER; note = cEt 5-methylcytidine 3'-phosphorothioate
  modified_base 3: mod_base = OTHER; note = cEt thymidine 3'-phosphorothioate
  modified_base 4..5: mod_base = OTHER; note = 2'-deoxyguanosine 3'-phosphorothioate
  modified_base 6: mod_base = OTHER; note = 2'-deoxyadenosine 3'-phosphorothioate
  modified_base 7..8: mod_base = OTHER; note = 5-methyl-2'-deoxycytidine 3'-phosphorothioate
  modified_base 9..12: mod_base = OTHER; note = 2'-deoxyadenosine 3'-phosphorothioate
  modified_base 13: mod_base = OTHER; note = 2'-deoxyguanosine 3'-phosphorothioate
  modified_base 14: mod_base = OTHER; note = cEt guanosine 3'-phosphorothioate
  modified_base 15: mod_base = OTHER; note = cEt adenosine 3'-phosphorothioate
  modified_base 16: mod_base = OTHER; note = cEt guanosine
cctggaccaaaaggag

SEQ ID NO: 1122 - DNA, 16 bp, synthetic construct
  source 1..16: mol_type = other DNA
  modified_base 1: mod_base = OTHER; note = cEt 5-methylcytidine 3'-phosphorothioate
  modified_base 3: mod_base = OTHER; note = cEt 5-methylcytidine 3'-phosphorothioate
  modified_base 2: mod_base = OTHER; note = cEt adenosine 3'-phosphorothioate
  modified_base 4: mod_base = OTHER; note = 5-methyl-2'-deoxycytidine 3'-phosphorothioate
  modified_base 5: mod_base = OTHER; note = 2'-deoxythymidine 3'-phosphorothioate
  modified_base 6..7: mod_base = OTHER; note = 2'-deoxyguanosine 3'-phosphorothioate
  modified_base 8: mod_base = OTHER; note = 2'-deoxyadenosine 3'-phosphorothioate
  modified_base 9..10: mod_base = OTHER; note = 5-methyl-2'-deoxycytidine 3'-phosphorothioate
  modified_base 11..13: mod_base = OTHER; note = 2'-deoxyadenosine 3'-phosphorothioate
  modified_base 14: mod_base = OTHER; note = cEt adenosine 3'-phosphorothioate
  modified_base 15: mod_base = OTHER; note = cEt guanosine 3'-phosphorothioate
  modified_base 16: mod_base = OTHER; note = cEt guanosine
cacctggaccaaaagg

SEQ ID NO: 1123 - DNA, 16 bp, synthetic construct
  source 1..16: mol_type = other DNA
  modified_base 1: mod_base = OTHER; note = cEt 5-methylcytidine 3'-phosphorothioate
  modified_base 3: mod_base = OTHER; note = cEt 5-methylcytidine 3'-phosphorothioate
  modified_base 2: mod_base = OTHER; note = cEt guanosine 3'-phosphorothioate
  modified_base 4: mod_base = OTHER; note = 2'-deoxyadenosine 3'-phosphorothioate
  modified_base 5..6: mod_base = OTHER; note = 5-methyl-2'-deoxycytidine 3'-phosphorothioate
  modified_base 7: mod_base = OTHER; note = 2'-deoxythymidine 3'-phosphorothioate
  modified_base 8..9: mod_base = OTHER; note = 2'-deoxyguanosine 3'-phosphorothioate
  modified_base 10: mod_base = OTHER; note = 2'-deoxyadenosine 3'-phosphorothioate
  modified_base 11..12: mod_base = OTHER; note = 5-methyl-2'-deoxycytidine 3'-phosphorothioate
  modified_base 13: mod_base = OTHER; note = 2'-deoxyadenosine 3'-phosphorothioate
  modified_base 14..15: mod_base = OTHER; note = cEt adenosine 3'-phosphorothioate
  modified_base 16: mod_base = OTHER; note = cEt adenosine
cgcacctggaccaaaa

SEQ ID NO: 1124 - DNA, 16 bp, synthetic construct
  source 1..16: mol_type = other DNA
  modified_base 1: mod_base = OTHER; note = cEt guanosine 3'-phosphorothioate
  modified_base 2: mod_base = OTHER; note = cEt adenosine 3'-phosphorothioate
  modified_base 3: mod_base = OTHER; note = cEt 5-methylcytidine 3'-phosphorothioate
  modified_base 4: mod_base = OTHER; note = 5-methyl-2'-deoxycytidine 3'-phosphorothioate
  modified_base 5: mod_base = OTHER; note = 2'-deoxyguanosine 3'-phosphorothioate
  modified_base 6: mod_base = OTHER; note = 5-methyl-2'-deoxycytidine 3'-phosphorothioate
  modified_base 7: mod_base = OTHER; note = 2'-deoxyadenosine 3'-phosphorothioate
  modified_base 8..9: mod_base = OTHER; note = 5-methyl-2'-deoxycytidine 3'-phosphorothioate
  modified_base 10: mod_base = OTHER; note = 2'-deoxythymidine 3'-phosphorothioate
  modified_base 11..12: mod_base = OTHER; note = 2'-deoxyguanosine 3'-phosphorothioate
  modified_base 13: mod_base = OTHER; note = 2'-deoxyadenosine 3'-phosphorothioate
  modified_base 14..15: mod_base = OTHER; note = cEt 5-methylcytidine 3'-phosphorothioate
  modified_base 16: mod_base = OTHER; note = cEt adenosine
gaccgcacctggacca

SEQ ID NO: 1125 - DNA, 16 bp, synthetic construct
  source 1..16: mol_type = other DNA
  modified_base 1: mod_base = OTHER; note = cEt adenosine 3'-phosphorothioate
  modified_base 2..3: mod_base = OTHER; note = cEt 5-methylcytidine 3'-phosphorothioate
  modified_base 4..5: mod_base = OTHER; note = 2'-deoxythymidine 3'-phosphorothioate
  modified_base 6: mod_base = OTHER; note = 2'-deoxyguanosine 3'-phosphorothioate
  modified_base 7: mod_base = OTHER; note = 2'-deoxythymidine 3'-phosphorothioate
  modified_base 8: mod_base = OTHER; note = 2'-deoxyadenosine 3'-phosphorothioate
  modified_base 9: mod_base = OTHER; note = 2'-deoxyguanosine 3'-phosphorothioate
  modified_base 10: mod_base = OTHER; note = 2'-deoxythymidine 3'-phosphorothioate
  modified_base 11..12: mod_base = OTHER; note = 2'-deoxyguanosine 3'-phosphorothioate
  modified_base 13: mod_base = OTHER; note = 2'-deoxyadenosine 3'-phosphorothioate
  modified_base 14: mod_base = OTHER; note = cEt 5-methylcytidine 3'-phosphorothioate
  modified_base 15: mod_base = OTHER; note = cEt guanosine 3'-phosphorothioate
  modified_base 16: mod_base = OTHER; note = cEt adenosine
accttgtagtggacga

SEQ ID NO: 1126 - DNA, 16 bp, synthetic construct
  source 1..16: mol_type = other DNA
  modified_base 1: mod_base = OTHER; note = cEt thymidine 3'-phosphorothioate
  modified_base 2: mod_base = OTHER; note = cEt 5-methylcytidine 3'-phosphorothioate
  modified_base 3: mod_base = OTHER; note = cEt adenosine 3'-phosphorothioate
  modified_base 4..5: mod_base = OTHER; note = 5-methyl-2'-deoxycytidine 3'-phosphorothioate
  modified_base 6..7: mod_base = OTHER; note = 2'-deoxythymidine 3'-phosphorothioate
  modified_base 8: mod_base = OTHER; note = 2'-deoxyguanosine 3'-phosphorothioate
  modified_base 9: mod_base = OTHER; note = 2'-deoxythymidine 3'-phosphorothioate
  modified_base 10: mod_base = OTHER; note = 2'-deoxyadenosine 3'-phosphorothioate
  modified_base 11: mod_base = OTHER; note = 2'-deoxyguanosine 3'-phosphorothioate
  modified_base 12: mod_base = OTHER; note = 2'-deoxythymidine 3'-phosphorothioate
  modified_base 13: mod_base = OTHER; note = 2'-deoxyguanosine 3'-phosphorothioate
  modified_base 14: mod_base = OTHER; note = cEt guanosine 3'-phosphorothioate
  modified_base 15: mod_base = OTHER; note = cEt adenosine 3'-phosphorothioate
  modified_base 16: mod_base = OTHER; note = cEt 5-methylcytidine
tcaccttgtagtggac

SEQ ID NO: 1127 - DNA, 16 bp, synthetic construct
  source 1..16: mol_type = other DNA
  modified_base 1: mod_base = OTHER; note = cEt guanosine 3'-phosphorothioate
  modified_base 2: mod_base = OTHER; note = cEt 5-methylcytidine 3'-phosphorothioate
  modified_base 3: mod_base = OTHER; note = cEt thymidine 3'-phosphorothioate
  modified_base 4: mod_base = OTHER; note = 5-methyl-2'-deoxycytidine 3'-phosphorothioate
  modified_base 5: mod_base = OTHER; note = 2'-deoxyadenosine 3'-phosphorothioate
  modified_base 6..7: mod_base = OTHER; note = 5-methyl-2'-deoxycytidine 3'-phosphorothioate
  modified_base 8..9: mod_base = OTHER; note = 2'-deoxythymidine 3'-phosphorothioate
  modified_base 10: mod_base = OTHER; note = 2'-deoxyguanosine 3'-phosphorothioate
  modified_base 11: mod_base = OTHER; note = 2'-deoxythymidine 3'-phosphorothioate
  modified_base 12: mod_base = OTHER; note = 2'-deoxyadenosine 3'-phosphorothioate
  modified_base 13: mod_base = OTHER; note = 2'-deoxyguanosine 3'-phosphorothioate
  modified_base 14: mod_base = OTHER; note = cEt thymidine 3'-phosphorothioate
  modified_base 15: mod_base = OTHER; note = cEt guanosine 3'-phosphorothioate
  modified_base 16: mod_base = OTHER; note = cEt guanosine
gctcaccttgtagtgg

SEQ ID NO: 1128 - DNA, 16 bp, synthetic construct
  source 1..16: mol_type = other DNA
  modified_base 1..2: mod_base = OTHER; note = cEt guanosine 3'-phosphorothioate
  modified_base 3: mod_base = OTHER; note = cEt adenosine 3'-phosphorothioate
  modified_base 4: mod_base = OTHER; note = 2'-deoxyguanosine 3'-phosphorothioate
  modified_base 5: mod_base = OTHER; note = 2'-deoxyadenosine 3'-phosphorothioate
  modified_base 6..7: mod_base = OTHER; note = 2'-deoxyguanosine 3'-phosphorothioate
  modified_base 8: mod_base = OTHER; note = 2'-deoxyadenosine 3'-phosphorothioate
  modified_base 9..10: mod_base = OTHER; note = 2'-deoxyguanosine 3'-phosphorothioate
  modified_base 11: mod_base = OTHER; note = 5-methyl-2'-deoxycytidine 3'-phosphorothioate
  modified_base 12: mod_base = OTHER; note = 2'-deoxyguanosine 3'-phosphorothioate
  modified_base 13: mod_base = OTHER; note = 2'-deoxyadenosine 3'-phosphorothioate
  modified_base 14: mod_base = OTHER; note = cEt thymidine 3'-phosphorothioate
  modified_base 15: mod_base = OTHER; note = cEt adenosine 3'-phosphorothioate
  modified_base 16: mod_base = OTHER; note = cEt guanosine
ggagaggaggcgatag

SEQ ID NO: 1129 - DNA, 16 bp, synthetic construct
  source 1..16: mol_type = other DNA
  modified_base 1: mod_base = OTHER; note = cEt adenosine 3'-phosphorothioate
  modified_base 2..3: mod_base = OTHER; note = cEt guanosine 3'-phosphorothioate
  modified_base 4: mod_base = OTHER; note = 2'-deoxyguanosine 3'-phosphorothioate
  modified_base 5: mod_base = OTHER; note = 2'-deoxyadenosine 3'-phosphorothioate
  modified_base 6: mod_base = OTHER; note = 2'-deoxyguanosine 3'-phosphorothioate
  modified_base 7: mod_base = OTHER; note = 2'-deoxyadenosine 3'-phosphorothioate
  modified_base 8..9: mod_base = OTHER; note = 2'-deoxyguanosine 3'-phosphorothioate
  modified_base 10: mod_base = OTHER; note = 2'-deoxyadenosine 3'-phosphorothioate
  modified_base 11..12: mod_base = OTHER; note = 2'-deoxyguanosine 3'-phosphorothioate
  modified_base 13: mod_base = OTHER; note = 5-methyl-2'-deoxycytidine 3'-phosphorothioate
  modified_base 14: mod_base = OTHER; note = cEt guanosine 3'-phosphorothioate
  modified_base 15: mod_base = OTHER; note = cEt adenosine 3'-phosphorothioate
  modified_base 16: mod_base = OTHER; note = cEt thymidine
agggagaggaggcgat

SEQ ID NO: 1130 - DNA, 16 bp, synthetic construct
  source 1..16: mol_type = other DNA
  modified_base 1: mod_base = OTHER; note = cEt 5-methylcytidine 3'-phosphorothioate
  modified_base 3: mod_base = OTHER; note = cEt 5-methylcytidine 3'-phosphorothioate
  modified_base 2: mod_base = OTHER; note = cEt thymidine 3'-phosphorothioate
  modified_base 4: mod_base = OTHER; note = 5-methyl-2'-deoxycytidine 3'-phosphorothioate
  modified_base 5: mod_base = OTHER; note = 2'-deoxythymidine 3'-phosphorothioate
  modified_base 6: mod_base = OTHER; note = 2'-deoxyguanosine 3'-phosphorothioate
  modified_base 7: mod_base = OTHER; note = 5-methyl-2'-deoxycytidine 3'-phosphorothioate
  modified_base 8: mod_base = OTHER; note = 2'-deoxythymidine 3'-phosphorothioate
  modified_base 9: mod_base = OTHER; note = 5-methyl-2'-deoxycytidine 3'-phosphorothioate
  modified_base 10: mod_base = OTHER; note = 2'-deoxyadenosine 3'-phosphorothioate
  modified_base 11: mod_base = OTHER; note = 2'-deoxyguanosine 3'-phosphorothioate
  modified_base 12: mod_base = OTHER; note = 2'-deoxyadenosine 3'-phosphorothioate
  modified_base 13: mod_base = OTHER; note = 2'-deoxyguanosine 3'-phosphorothioate
  modified_base 14..15: mod_base = OTHER; note = cEt guanosine 3'-phosphorothioate
  modified_base 16: mod_base = OTHER; note = cEt adenosine
ctcctgctcagaggga

SEQ ID NO: 1131 - DNA, 16 bp, synthetic construct
  source 1..16: mol_type = other DNA
  modified_base 1: mod_base = OTHER; note = cEt guanosine 3'-phosphorothioate
  modified_base 3: mod_base = OTHER; note = cEt guanosine 3'-phosphorothioate
  modified_base 2: mod_base = OTHER; note = cEt thymidine 3'-phosphorothioate
  modified_base 4: mod_base = OTHER; note = 5-methyl-2'-deoxycytidine 3'-phosphorothioate
  modified_base 5: mod_base = OTHER; note = 2'-deoxythymidine 3'-phosphorothioate
  modified_base 6..7: mod_base = OTHER; note = 5-methyl-2'-deoxycytidine 3'-phosphorothioate
  modified_base 8: mod_base = OTHER; note = 2'-deoxythymidine 3'-phosphorothioate
  modified_base 9: mod_base = OTHER; note = 2'-deoxyguanosine 3'-phosphorothioate
  modified_base 10: mod_base = OTHER; note = 5-methyl-2'-deoxycytidine 3'-phosphorothioate
  modified_base 11: mod_base = OTHER; note = 2'-deoxythymidine 3'-phosphorothioate
  modified_base 12: mod_base = OTHER; note = 5-methyl-2'-deoxycytidine 3'-phosphorothioate
  modified_base 13: mod_base = OTHER; note = 2'-deoxyadenosine 3'-phosphorothioate
  modified_base 14: mod_base = OTHER; note = cEt guanosine 3'-phosphorothioate
  modified_base 15: mod_base = OTHER; note = cEt adenosine 3'-phosphorothioate
  modified_base 16: mod_base = OTHER; note = cEt guanosine
gtgctcctgctcagag

SEQ ID NO: 1132 - DNA, 16 bp, synthetic construct
  source 1..16: mol_type = other DNA
  modified_base 1: mod_base = OTHER; note = cEt adenosine 3'-phosphorothioate
  modified_base 2..3: mod_base = OTHER; note = cEt guanosine 3'-phosphorothioate
  modified_base 4: mod_base = OTHER; note = 2'-deoxythymidine 3'-phosphorothioate
  modified_base 5: mod_base = OTHER; note = 2'-deoxyguanosine 3'-phosphorothioate
  modified_base 6: mod_base = OTHER; note = 5-methyl-2'-deoxycytidine 3'-phosphorothioate
  modified_base 7: mod_base = OTHER; note = 2'-deoxythymidine 3'-phosphorothioate
  modified_base 8..9: mod_base = OTHER; note = 5-methyl-2'-deoxycytidine 3'-phosphorothioate
  modified_base 10: mod_base = OTHER; note = 2'-deoxythymidine 3'-phosphorothioate
  modified_base 11: mod_base = OTHER; note = 2'-deoxyguanosine 3'-phosphorothioate
  modified_base 12: mod_base = OTHER; note = 5-methyl-2'-deoxycytidine 3'-phosphorothioate
  modified_base 13: mod_base = OTHER; note = 2'-deoxythymidine 3'-phosphorothioate
  modified_base 14: mod_base = OTHER; note = cEt 5-methylcytidine 3'-phosphorothioate
  modified_base 15: mod_base = OTHER; note = cEt adenosine 3'-phosphorothioate
  modified_base 16: mod_base = OTHER; note = cEt guanosine
aggtgctcctgctcag

SEQ ID NO: 1133 - DNA, 16 bp, synthetic construct
  source 1..16: mol_type = other DNA
  modified_base 1: mod_base = OTHER; note = cEt adenosine 3'-phosphorothioate
  modified_base 3: mod_base = OTHER; note = cEt adenosine 3'-phosphorothioate
  modified_base 2: mod_base = OTHER; note = cEt guanosine 3'-phosphorothioate
  modified_base 4..5: mod_base = OTHER; note = 2'-deoxyguanosine 3'-phosphorothioate
  modified_base 6: mod_base = OTHER; note = 2'-deoxythymidine 3'-phosphorothioate
  modified_base 7: mod_base = OTHER; note = 2'-deoxyguanosine 3'-phosphorothioate
  modified_base 8: mod_base = OTHER; note = 5-methyl-2'-deoxycytidine 3'-phosphorothioate
  modified_base 9: mod_base = OTHER; note = 2'-deoxythymidine 3'-phosphorothioate
  modified_base 10..11: mod_base = OTHER; note = 5-methyl-2'-deoxycytidine 3'-phosphorothioate
  modified_base 12: mod_base = OTHER; note = 2'-deoxythymidine 3'-phosphorothioate
  modified_base 13: mod_base = OTHER; note = 2'-deoxyguanosine 3'-phosphorothioate
  modified_base 14: mod_base = OTHER; note = cEt 5-methylcytidine 3'-phosphorothioate
  modified_base 15: mod_base = OTHER; note = cEt thymidine 3'-phosphorothioate
  modified_base 16: mod_base = OTHER; note = cEt 5-methylcytidine
agaggtgctcctgctc

SEQ ID NO: 1134 - DNA, 16 bp, synthetic construct
  source 1..16: mol_type = other DNA
  modified_base 1: mod_base = OTHER; note = cEt adenosine 3'-phosphorothioate
  modified_base 3: mod_base = OTHER; note = cEt adenosine 3'-phosphorothioate
  modified_base 2: mod_base = OTHER; note = cEt guanosine 3'-phosphorothioate
  modified_base 4: mod_base = OTHER; note = 2'-deoxyguanosine 3'-phosphorothioate
  modified_base 5: mod_base = OTHER; note = 2'-deoxyadenosine 3'-phosphorothioate
  modified_base 6..7: mod_base = OTHER; note = 2'-deoxyguanosine 3'-phosphorothioate
  modified_base 8: mod_base = OTHER; note = 2'-deoxythymidine 3'-phosphorothioate
  modified_base 9: mod_base = OTHER; note = 2'-deoxyguanosine 3'-phosphorothioate
  modified_base 10: mod_base = OTHER; note = 5-methyl-2'-deoxycytidine 3'-phosphorothioate
  modified_base 11: mod_base = OTHER; note = 2'-deoxythymidine 3'-phosphorothioate
  modified_base 12..13: mod_base = OTHER; note = 5-methyl-2'-deoxycytidine 3'-phosphorothioate
  modified_base 14: mod_base = OTHER; note = cEt thymidine 3'-phosphorothioate
  modified_base 15: mod_base = OTHER; note = cEt guanosine 3'-phosphorothioate
  modified_base 16: mod_base = OTHER; note = cEt 5-methylcytidine
agagaggtgctcctgc

SEQ ID NO: 1135 - DNA, 16 bp, synthetic construct
  source 1..16: mol_type = other DNA
  modified_base 1: mod_base = OTHER; note = cEt adenosine 3'-phosphorothioate
  modified_base 2..3: mod_base = OTHER; note = cEt 5-methylcytidine 3'-phosphorothioate
  modified_base 4..5: mod_base = OTHER; note = 5-methyl-2'-deoxycytidine 3'-phosphorothioate
  modified_base 6: mod_base = OTHER; note = 2'-deoxyguanosine 3'-phosphorothioate
  modified_base 7..11: mod_base = OTHER; note = 5-methyl-2'-deoxycytidine 3'-phosphorothioate
  modified_base 12: mod_base = OTHER; note = 2'-deoxyguanosine 3'-phosphorothioate
  modified_base 13: mod_base = OTHER; note = 5-methyl-2'-deoxycytidine 3'-phosphorothioate
  modified_base 14: mod_base = OTHER; note = cEt thymidine 3'-phosphorothioate
  modified_base 15: mod_base = OTHER; note = cEt 5-methylcytidine 3'-phosphorothioate
  modified_base 16: mod_base = OTHER; note = cEt adenosine
accccgcccccgctca

SEQ ID NO: 1136 - DNA, 16 bp, synthetic construct
  source 1..16: mol_type = other DNA
  modified_base 1: mod_base = OTHER; note = cEt 5-methylcytidine 3'-phosphorothioate
  modified_base 2: mod_base = OTHER; note = cEt thymidine 3'-phosphorothioate
  modified_base 3: mod_base = OTHER; note = cEt adenosine 3'-phosphorothioate
  modified_base 4..7: mod_base = OTHER; note = 5-methyl-2'-deoxycytidine 3'-phosphorothioate
  modified_base 8: mod_base = OTHER; note = 2'-deoxyguanosine 3'-phosphorothioate
  modified_base 9..13: mod_base = OTHER; note = 5-methyl-2'-deoxycytidine 3'-phosphorothioate
  modified_base 14: mod_base = OTHER; note = cEt guanosine 3'-phosphorothioate
  modified_base 15: mod_base = OTHER; note = cEt 5-methylcytidine 3'-phosphorothioate
  modified_base 16: mod_base = OTHER; note = cEt thymidine
ctaccccgcccccgct

SEQ ID NO: 1137 - DNA, 16 bp, synthetic construct
  source 1..16: mol_type = other DNA
  modified_base 1: mod_base = OTHER; note = cEt adenosine 3'-phosphorothioate
  modified_base 2..3: mod_base = OTHER; note = cEt 5-methylcytidine 3'-phosphorothioate
  modified_base 4: mod_base = OTHER; note = 2'-deoxythymidine 3'-phosphorothioate
  modified_base 5: mod_base = OTHER; note = 2'-deoxyadenosine 3'-phosphorothioate
  modified_base 6..9: mod_base = OTHER; note = 5-methyl-2'-deoxycytidine 3'-phosphorothioate
  modified_base 10: mod_base = OTHER; note = 2'-deoxyguanosine 3'-phosphorothioate
  modified_base 11..13: mod_base = OTHER; note = 5-methyl-2'-deoxycytidine 3'-phosphorothioate
  modified_base 14..15: mod_base = OTHER; note = cEt 5-methylcytidine 3'-phosphorothioate
  modified_base 16: mod_base = OTHER; note = cEt guanosine
acctaccccgcccccg

SEQ ID NO: 1138 - DNA, 16 bp, synthetic construct
  source 1..16: mol_type = other DNA
  modified_base 1: mod_base = OTHER; note = cEt guanosine 3'-phosphorothioate
  modified_base 2: mod_base = OTHER; note = cEt thymidine 3'-phosphorothioate
  modified_base 3: mod_base = OTHER; note = cEt adenosine 3'-phosphorothioate
  modified_base 4..5: mod_base = OTHER; note = 5-methyl-2'-deoxycytidine 3'-phosphorothioate
  modified_base 6: mod_base = OTHER; note = 2'-deoxythymidine 3'-phosphorothioate
  modified_base 7: mod_base = OTHER; note = 2'-deoxyadenosine 3'-phosphorothioate
  modified_base 8..11: mod_base = OTHER; note = 5-methyl-2'-deoxycytidine 3'-phosphorothioate
  modified_base 12: mod_base = OTHER; note = 2'-deoxyguanosine 3'-phosphorothioate
  modified_base 13: mod_base = OTHER; note = 5-methyl-2'-deoxycytidine 3'-phosphorothioate
  modified_base 14..15: mod_base = OTHER; note = cEt 5-methylcytidine 3'-phosphorothioate
  modified_base 16: mod_base = OTHER; note = cEt 5-methylcytidine
gtacctaccccgcccc

SEQ ID NO: 1139 - DNA, 16 bp, synthetic construct
  source 1..16: mol_type = other DNA
  modified_base 1: mod_base = OTHER; note = cEt adenosine 3'-phosphorothioate
  modified_base 2..3: mod_base = OTHER; note = cEt guanosine 3'-phosphorothioate
  modified_base 4: mod_base = OTHER; note = 2'-deoxythymidine 3'-phosphorothioate
  modified_base 5: mod_base = OTHER; note = 2'-deoxyadenosine 3'-phosphorothioate
  modified_base 6..7: mod_base = OTHER; note = 5-methyl-2'-deoxycytidine 3'-phosphorothioate
  modified_base 8: mod_base = OTHER; note = 2'-deoxythymidine 3'-phosphorothioate
  modified_base 9: mod_base = OTHER; note = 2'-deoxyadenosine 3'-phosphorothioate
  modified_base 10..13: mod_base = OTHER; note = 5-methyl-2'-deoxycytidine 3'-phosphorothioate
  modified_base 14: mod_base = OTHER; note = cEt guanosine 3'-phosphorothioate
  modified_base 15: mod_base = OTHER; note = cEt 5-methylcytidine 3'-phosphorothioate
  modified_base 16: mod_base = OTHER; note = cEt 5-methylcytidine
aggtacctaccccgcc

SEQ ID NO: 1140 - DNA, 16 bp, synthetic construct
  source 1..16: mol_type = other DNA
  modified_base 1..3: mod_base = OTHER; note = cEt guanosine 3'-phosphorothioate
  modified_base 4: mod_base = OTHER; note = 2'-deoxyadenosine 3'-phosphorothioate
  modified_base 5..6: mod_base = OTHER; note = 2'-deoxyguanosine 3'-phosphorothioate
  modified_base 7..8: mod_base = OTHER; note = 2'-deoxythymidine 3'-phosphorothioate
  modified_base 9..11: mod_base = OTHER; note = 5-methyl-2'-deoxycytidine 3'-phosphorothioate
  modified_base 12: mod_base = OTHER; note = 2'-deoxyguanosine 3'-phosphorothioate
  modified_base 13: mod_base = OTHER; note = 5-methyl-2'-deoxycytidine 3'-phosphorothioate
  modified_base 14: mod_base = OTHER; note = cEt adenosine 3'-phosphorothioate
  modified_base 15: mod_base = OTHER; note = cEt guanosine 3'-phosphorothioate
  modified_base 16: mod_base = OTHER; note = cEt 5-methylcytidine
gggaggttcccgcagc

SEQ ID NO: 1141 - DNA, 16 bp, synthetic construct
  source 1..16: mol_type = other DNA
  modified_base 1: mod_base = OTHER; note = cEt guanosine 3'-phosphorothioate
  modified_base 2: mod_base = OTHER; note = cEt thymidine 3'-phosphorothioate
  modified_base 3: mod_base = OTHER; note = cEt 5-methylcytidine 3'-phosphorothioate
  modified_base 4: mod_base = OTHER; note = 5-methyl-2'-deoxycytidine 3'-phosphorothioate
  modified_base 5..6: mod_base = OTHER; note = 2'-deoxythymidine 3'-phosphorothioate
  modified_base 7: mod_base = OTHER; note = 2'-deoxyadenosine 3'-phosphorothioate
  modified_base 8: mod_base = OTHER; note = 5-methyl-2'-deoxycytidine 3'-phosphorothioate
  modified_base 9: mod_base = OTHER; note = 2'-deoxythymidine 3'-phosphorothioate
  modified_base 10..11: mod_base = OTHER; note = 5-methyl-2'-deoxycytidine 3'-phosphorothioate
  modified_base 12..13: mod_base = OTHER; note = 2'-deoxyadenosine 3'-phosphorothioate
  modified_base 14: mod_base = OTHER; note = cEt 5-methylcytidine 3'-phosphorothioate
  modified_base 15: mod_base = OTHER; note = cEt thymidine 3'-phosphorothioate
  modified_base 16: mod_base = OTHER; note = cEt thymidine
gtccttactccaactt

SEQ ID NO: 1142 - DNA, 16 bp, synthetic construct
  source 1..16: mol_type = other DNA
  modified_base 1: mod_base = OTHER; note = cEt 5-methylcytidine 3'-phosphorothioate
  modified_base 2: mod_base = OTHER; note = cEt thymidine 3'-phosphorothioate
  modified_base 3: mod_base = OTHER; note = cEt guanosine 3'-phosphorothioate
  modified_base 4: mod_base = OTHER; note = 2'-deoxythymidine 3'-phosphorothioate
  modified_base 5..6: mod_base = OTHER; note = 5-methyl-2'-deoxycytidine 3'-phosphorothioate
  modified_base 7..8: mod_base = OTHER; note = 2'-deoxythymidine 3'-phosphorothioate
  modified_base 9: mod_base = OTHER; note = 2'-deoxyadenosine 3'-phosphorothioate
  modified_base 10: mod_base = OTHER; note = 5-methyl-2'-deoxycytidine 3'-phosphorothioate
  modified_base 11: mod_base = OTHER; note = 2'-deoxythymidine 3'-phosphorothioate
  modified_base 12..13: mod_base = OTHER; note = 5-methyl-2'-deoxycytidine 3'-phosphorothioate
  modified_base 14..15: mod_base = OTHER; note = cEt adenosine 3'-phosphorothioate
  modified_base 16: mod_base = OTHER; note = cEt 5-methylcytidine
ctgtccttactccaac

SEQ ID NO: 1143 - DNA, 16 bp, synthetic construct
  source 1..16: mol_type = other DNA
  modified_base 1: mod_base = OTHER; note = cEt 5-methylcytidine 3'-phosphorothioate
  modified_base 3: mod_base = OTHER; note = cEt 5-methylcytidine 3'-phosphorothioate
  modified_base 2: mod_base = OTHER; note = cEt adenosine 3'-phosphorothioate
  modified_base 4: mod_base = OTHER; note = 2'-deoxythymidine 3'-phosphorothioate
  modified_base 5: mod_base = OTHER; note = 2'-deoxyguanosine 3'-phosphorothioate
  modified_base 6: mod_base = OTHER; note = 2'-deoxythymidine 3'-phosphorothioate
  modified_base 7..8: mod_base = OTHER; note = 5-methyl-2'-deoxycytidine 3'-phosphorothioate
  modified_base 9..10: mod_base = OTHER; note = 2'-deoxythymidine 3'-phosphorothioate
  modified_base 11: mod_base = OTHER; note = 2'-deoxyadenosine 3'-phosphorothioate
  modified_base 12: mod_base = OTHER; note = 5-methyl-2'-deoxycytidine 3'-phosphorothioate
  modified_base 13: mod_base = OTHER; note = 2'-deoxythymidine 3'-phosphorothioate
  modified_base 14..15: mod_base = OTHER; note = cEt 5-methylcytidine 3'-phosphorothioate
  modified_base 16: mod_base = OTHER; note = cEt adenosine
cactgtccttactcca

SEQ ID NO: 1144 - DNA, 16 bp, synthetic construct
  source 1..16: mol_type = other DNA
  modified_base 1..2: mod_base = OTHER; note = cEt guanosine 3'-phosphorothioate
  modified_base 3: mod_base = OTHER; note = cEt 5-methylcytidine 3'-phosphorothioate
  modified_base 4: mod_base = OTHER; note = 2'-deoxyadenosine 3'-phosphorothioate
  modified_base 5: mod_base = OTHER; note = 5-methyl-2'-deoxycytidine 3'-phosphorothioate
  modified_base 6: mod_base = OTHER; note = 2'-deoxythymidine 3'-phosphorothioate
  modified_base 7: mod_base = OTHER; note = 2'-deoxyguanosine 3'-phosphorothioate
  modified_base 8: mod_base = OTHER; note = 2'-deoxythymidine 3'-phosphorothioate
  modified_base 9..10: mod_base = OTHER; note = 5-methyl-2'-deoxycytidine 3'-phosphorothioate
  modified_base 11..12: mod_base = OTHER; note = 2'-deoxythymidine 3'-phosphorothioate
  modified_base 13: mod_base = OTHER; note = 2'-deoxyadenosine 3'-phosphorothioate
  modified_base 14: mod_base = OTHER; note = cEt 5-methylcytidine 3'-phosphorothioate
  modified_base 15: mod_base = OTHER; note = cEt thymidine 3'-phosphorothioate
  modified_base 16: mod_base = OTHER; note = cEt 5-methylcytidine
ggcactgtccttactc

SEQ ID NO: 1145 - DNA, 16 bp, synthetic construct
  source 1..16: mol_type = other DNA
  modified_base 1: mod_base = OTHER; note = cEt thymidine 3'-phosphorothioate
  modified_base 2: mod_base = OTHER; note = cEt adenosine 3'-phosphorothioate
  modified_base 3: mod_base = OTHER; note = cEt guanosine 3'-phosphorothioate
  modified_base 4: mod_base = OTHER; note = 2'-deoxyguanosine 3'-phosphorothioate
  modified_base 5: mod_base = OTHER; note = 5-methyl-2'-deoxycytidine 3'-phosphorothioate
  modified_base 6: mod_base = OTHER; note = 2'-deoxyadenosine 3'-phosphorothioate
  modified_base 7: mod_base = OTHER; note = 5-methyl-2'-deoxycytidine 3'-phosphorothioate
  modified_base 8: mod_base = OTHER; note = 2'-deoxythymidine 3'-phosphorothioate
  modified_base 9: mod_base = OTHER; note = 2'-deoxyguanosine 3'-phosphorothioate
  modified_base 10: mod_base = OTHER; note = 2'-deoxythymidine 3'-phosphorothioate
  modified_base 11..12: mod_base = OTHER; note = 5-methyl-2'-deoxycytidine 3'-phosphorothioate
  modified_base 13: mod_base = OTHER; note = 2'-deoxythymidine 3'-phosphorothioate
  modified_base 14: mod_base = OTHER; note = cEt thymidine 3'-phosphorothioate
  modified_base 15: mod_base = OTHER; note = cEt adenosine 3'-phosphorothioate
  modified_base 16: mod_base = OTHER; note = cEt 5-methylcytidine
taggcactgtccttac

SEQ ID NO: 1146 - DNA, 16 bp, synthetic construct
  source 1..16: mol_type = other DNA
  modified_base 1..2: mod_base = OTHER; note = cEt guanosine 3'-phosphorothioate
  modified_base 3: mod_base = OTHER; note = cEt thymidine 3'-phosphorothioate
  modified_base 4: mod_base = OTHER; note = 2'-deoxyadenosine 3'-phosphorothioate
  modified_base 5..6: mod_base = OTHER; note = 2'-deoxyguanosine 3'-phosphorothioate
  modified_base 7: mod_base = OTHER; note = 5-methyl-2'-deoxycytidine 3'-phosphorothioate
  modified_base 8: mod_base = OTHER; note = 2'-deoxyadenosine 3'-phosphorothioate
  modified_base 9: mod_base = OTHER; note = 5-methyl-2'-deoxycytidine 3'-phosphorothioate
  modified_base 10: mod_base = OTHER; note = 2'-deoxythymidine 3'-phosphorothioate
  modified_base 11: mod_base = OTHER; note = 2'-deoxyguanosine 3'-phosphorothioate
  modified_base 12: mod_base = OTHER; note = 2'-deoxythymidine 3'-phosphorothioate
  modified_base 13: mod_base = OTHER; note = 5-methyl-2'-deoxycytidine 3'-phosphorothioate
  modified_base 14: mod_base = OTHER; note = cEt 5-methylcytidine 3'-phosphorothioate
  modified_base 15: mod_base = OTHER; note = cEt thymidine 3'-phosphorothioate
  modified_base 16: mod_base = OTHER; note = cEt thymidine
ggtaggcactgtcctt

SEQ ID NO: 1147 - DNA, 16 bp, synthetic construct
  source 1..16: mol_type = other DNA
  modified_base 1: mod_base = OTHER; note = cEt guanosine 3'-phosphorothioate
  modified_base 2: mod_base = OTHER; note = cEt thymidine 3'-phosphorothioate
  modified_base 3: mod_base = OTHER; note = cEt 5-methylcytidine 3'-phosphorothioate
  modified_base 4: mod_base = OTHER; note = 2'-deoxyadenosine 3'-phosphorothioate
  modified_base 5: mod_base = OTHER; note = 5-methyl-2'-deoxycytidine 3'-phosphorothioate
  modified_base 6: mod_base = OTHER; note = 2'-deoxythymidine 3'-phosphorothioate
  modified_base 7: mod_base = OTHER; note = 2'-deoxyguanosine 3'-phosphorothioate
  modified_base 8: mod_base = OTHER; note = 5-methyl-2'-deoxycytidine 3'-phosphorothioate
  modified_base 9: mod_base = OTHER; note = 2'-deoxythymidine 3'-phosphorothioate
  modified_base 10..12: mod_base = OTHER; note = 2'-deoxyguanosine 3'-phosphorothioate
  modified_base 13: mod_base = OTHER; note = 2'-deoxythymidine 3'-phosphorothioate
  modified_base 14..15: mod_base = OTHER; note = cEt 5-methylcytidine 3'-phosphorothioate
  modified_base 16: mod_base = OTHER; note = cEt thymidine
gtcactgctgggtcct

SEQ ID NO: 1148 - DNA, 16 bp, synthetic construct
  source 1..16: mol_type = other DNA
  modified_base 1..2: mod_base = OTHER; note = cEt guanosine 3'-phosphorothioate
  modified_base 3: mod_base = OTHER; note = cEt thymidine 3'-phosphorothioate
  modified_base 4: mod_base = OTHER; note = 5-methyl-2'-deoxycytidine 3'-phosphorothioate
  modified_base 5: mod_base = OTHER; note = 2'-deoxyadenosine 3'-phosphorothioate
  modified_base 6: mod_base = OTHER; note = 5-methyl-2'-deoxycytidine 3'-phosphorothioate
  modified_base 7: mod_base = OTHER; note = 2'-deoxythymidine 3'-phosphorothioate
  modified_base 8: mod_base = OTHER; note = 2'-deoxyguanosine 3'-phosphorothioate
  modified_base 9: mod_base = OTHER; note = 5-methyl-2'-deoxycytidine 3'-phosphorothioate
  modified_base 10: mod_base = OTHER; note = 2'-deoxythymidine 3'-phosphorothioate
  modified_base 11..13: mod_base = OTHER; note = 2'-deoxyguanosine 3'-phosphorothioate
  modified_base 14: mod_base = OTHER; note = cEt thymidine 3'-phosphorothioate
  modified_base 15: mod_base = OTHER; note = cEt 5-methylcytidine 3'-phosphorothioate
  modified_base 16: mod_base = OTHER; note = cEt 5-methylcytidine
ggtcactgctgggtcc

SEQ ID NO: 1149 - DNA, 16 bp, synthetic construct
  source 1..16: mol_type = other DNA
  modified_base 1: mod_base = OTHER; note = cEt adenosine 3'-phosphorothioate
  modified_base 2..3: mod_base = OTHER; note = cEt guanosine 3'-phosphorothioate
  modified_base 4: mod_base = OTHER; note = 2'-deoxythymidine 3'-phosphorothioate
  modified_base 5: mod_base = OTHER; note = 5-methyl-2'-deoxycytidine 3'-phosphorothioate
  modified_base 6: mod_base = OTHER; note = 2'-deoxyadenosine 3'-phosphorothioate
  modified_base 7: mod_base = OTHER; note = 5-methyl-2'-deoxycytidine 3'-phosphorothioate
  modified_base 8: mod_base = OTHER; note = 2'-deoxythymidine 3'-phosphorothioate
  modified_base 9: mod_base = OTHER; note = 2'-deoxyguanosine 3'-phosphorothioate
  modified_base 10: mod_base = OTHER; note = 5-methyl-2'-deoxycytidine 3'-phosphorothioate
  modified_base 11: mod_base = OTHER; note = 2'-deoxythymidine 3'-phosphorothioate
  modified_base 12..13: mod_base = OTHER; note = 2'-deoxyguanosine 3'-phosphorothioate
  modified_base 14: mod_base = OTHER; note = cEt guanosine 3'-phosphorothioate
  modified_base 15: mod_base = OTHER; note = cEt thymidine 3'-phosphorothioate
  modified_base 16: mod_base = OTHER; note = cEt 5-methylcytidine
aggtcactgctgggtc

SEQ ID NO: 1150 - DNA, 16 bp, synthetic construct
  source 1..16: mol_type = other DNA
  modified_base 1: mod_base = OTHER; note = cEt 5-methylcytidine 3'-phosphorothioate
  modified_base 2: mod_base = OTHER; note = cEt thymidine 3'-phosphorothioate
  modified_base 3: mod_base = OTHER; note = cEt adenosine 3'-phosphorothioate
  modified_base 4..5: mod_base = OTHER; note = 2'-deoxyguanosine 3'-phosphorothioate
  modified_base 6: mod_base = OTHER; note = 2'-deoxythymidine 3'-phosphorothioate
  modified_base 7: mod_base = OTHER; note = 5-methyl-2'-deoxycytidine 3'-phosphorothioate
  modified_base 8: mod_base = OTHER; note = 2'-deoxyadenosine 3'-phosphorothioate
  modified_base 9: mod_base = OTHER; note = 5-methyl-2'-deoxycytidine 3'-phosphorothioate
  modified_base 10: mod_base = OTHER; note = 2'-deoxythymidine 3'-phosphorothioate
  modified_base 11: mod_base = OTHER; note = 2'-deoxyguanosine 3'-phosphorothioate
  modified_base 12: mod_base = OTHER; note = 5-methyl-2'-deoxycytidine 3'-phosphorothioate
  modified_base 13: mod_base = OTHER; note = 2'-deoxythymidine 3'-phosphorothioate
  modified_base 14..15: mod_base = OTHER; note = cEt guanosine 3'-phosphorothioate
  modified_base 16: mod_base = OTHER; note = cEt guanosine
ctaggtcactgctggg

SEQ ID NO: 1151 - DNA, 16 bp, synthetic construct
  source 1..16: mol_type = other DNA
  modified_base 1: mod_base = OTHER; note = cEt guanosine 3'-phosphorothioate
  modified_base 2: mod_base = OTHER; note = cEt thymidine 3'-phosphorothioate
  modified_base 3: mod_base = OTHER; note = cEt 5-methylcytidine 3'-phosphorothioate
  modified_base 4: mod_base = OTHER; note = 2'-deoxythymidine 3'-phosphorothioate
  modified_base 5: mod_base = OTHER; note = 2'-deoxyadenosine 3'-phosphorothioate
  modified_base 6..7: mod_base = OTHER; note = 2'-deoxyguanosine 3'-phosphorothioate
  modified_base 8: mod_base = OTHER; note = 2'-deoxythymidine 3'-phosphorothioate
  modified_base 9: mod_base = OTHER; note = 5-methyl-2'-deoxycytidine 3'-phosphorothioate
  modified_base 10: mod_base = OTHER; note = 2'-deoxyadenosine 3'-phosphorothioate
  modified_base 11: mod_base = OTHER; note = 5-methyl-2'-deoxycytidine 3'-phosphorothioate
  modified_base 12: mod_base = OTHER; note = 2'-deoxythymidine 3'-phosphorothioate
  modified_base 13: mod_base = OTHER; note = 2'-deoxyguanosine 3'-phosphorothioate
  modified_base 14: mod_base = OTHER; note = cEt 5-methylcytidine 3'-phosphorothioate
  modified_base 15: mod_base = OTHER; note = cEt thymidine 3'-phosphorothioate
  modified_base 16: mod_base = OTHER; note = cEt guanosine
gtctaggtcactgctg

SEQ ID NO: 1152 - DNA, 16 bp, synthetic construct
  source 1..16: mol_type = other DNA
  modified_base 1..2: mod_base = OTHER; note = cEt adenosine 3'-phosphorothioate
  modified_base 3: mod_base = OTHER; note = cEt guanosine 3'-phosphorothioate
  modified_base 4: mod_base = OTHER; note = 2'-deoxythymidine 3'-phosphorothioate
  modified_base 5: mod_base = OTHER; note = 5-methyl-2'-deoxycytidine 3'-phosphorothioate
  modified_base 6: mod_base = OTHER; note = 2'-deoxythymidine 3'-phosphorothioate
  modified_base 7: mod_base = OTHER; note = 2'-deoxyadenosine 3'-phosphorothioate
  modified_base 8..9: mod_base = OTHER; note = 2'-deoxyguanosine 3'-phosphorothioate
  modified_base 10: mod_base = OTHER; note = 2'-deoxythymidine 3'-phosphorothioate
  modified_base 11: mod_base = OTHER; note = 5-methyl-2'-deoxycytidine 3'-phosphorothioate
  modified_base 12: mod_base = OTHER; note = 2'-deoxyadenosine 3'-phosphorothioate
  modified_base 13: mod_base = OTHER; note = 5-methyl-2'-deoxycytidine 3'-phosphorothioate
  modified_base 14: mod_base = OTHER; note = cEt thymidine 3'-phosphorothioate
  modified_base 15: mod_base = OTHER; note = cEt guanosine 3'-phosphorothioate
  modified_base 16: mod_base = OTHER; note = cEt 5-methylcytidine
aagtctaggtcactgc

SEQ ID NO: 1153 - DNA, 16 bp, synthetic construct
  source 1..16: mol_type = other DNA
  modified_base 1: mod_base = OTHER; note = cEt guanosine 3'-phosphorothioate
  modified_base 2: mod_base = OTHER; note = cEt 5-methylcytidine 3'-phosphorothioate
  modified_base 3: mod_base = OTHER; note = cEt adenosine 3'-phosphorothioate
  modified_base 4: mod_base = OTHER; note = 5-methyl-2'-deoxycytidine 3'-phosphorothioate
  modified_base 5: mod_base = OTHER; note = 2'-deoxythymidine 3'-phosphorothioate
  modified_base 6..7: mod_base = OTHER; note = 5-methyl-2'-deoxycytidine 3'-phosphorothioate
  modified_base 8: mod_base = OTHER; note = 2'-deoxyadenosine 3'-phosphorothioate
  modified_base 9..10: mod_base = OTHER; note = 2'-deoxythymidine 3'-phosphorothioate
  modified_base 11: mod_base = OTHER; note = 2'-deoxyguanosine 3'-phosphorothioate
  modified_base 12: mod_base = OTHER; note = 2'-deoxythymidine 3'-phosphorothioate
  modified_base 13: mod_base = OTHER; note = 5-methyl-2'-deoxycytidine 3'-phosphorothioate
  modified_base 14: mod_base = OTHER; note = cEt thymidine 3'-phosphorothioate
  modified_base 15: mod_base = OTHER; note = cEt 5-methylcytidine 3'-phosphorothioate
  modified_base 16: mod_base = OTHER; note = cEt adenosine
gcactccattgtctca

SEQ ID NO: 1154 - DNA, 16 bp, synthetic construct
  source 1..16: mol_type = other DNA
  modified_base 1: mod_base = OTHER; note = cEt 5-methylcytidine 3'-phosphorothioate
  modified_base 2: mod_base = OTHER; note = cEt thymidine 3'-phosphorothioate
  modified_base 3: mod_base = OTHER; note = cEt guanosine 3'-phosphorothioate
  modified_base 4: mod_base = OTHER; note = 5-methyl-2'-deoxycytidine 3'-phosphorothioate
  modified_base 5: mod_base = OTHER; note = 2'-deoxyadenosine 3'-phosphorothioate
  modified_base 6: mod_base = OTHER; note = 5-methyl-2'-deoxycytidine 3'-phosphorothioate
  modified_base 7: mod_base = OTHER; note = 2'-deoxythymidine 3'-phosphorothioate
  modified_base 8..9: mod_base = OTHER; note = 5-methyl-2'-deoxycytidine 3'-phosphorothioate
  modified_base 10: mod_base = OTHER; note = 2'-deoxyadenosine 3'-phosphorothioate
  modified_base 11..12: mod_base = OTHER; note = 2'-deoxythymidine 3'-phosphorothioate
  modified_base 13: mod_base = OTHER; note = 2'-deoxyguanosine 3'-phosphorothioate
  modified_base 14: mod_base = OTHER; note = cEt thymidine 3'-phosphorothioate
  modified_base 15: mod_base = OTHER; note = cEt 5-methylcytidine 3'-phosphorothioate
  modified_base 16: mod_base = OTHER; note = cEt thymidine
ctgcactccattgtct

SEQ ID NO: 1155 - DNA, 16 bp, synthetic construct
  source 1..16: mol_type = other DNA
  modified_base 1..3: mod_base = OTHER; note = cEt 5-methylcytidine 3'-phosphorothioate
  modified_base 4: mod_base = OTHER; note = 2'-deoxythymidine 3'-phosphorothioate
  modified_base 5: mod_base = OTHER; note = 2'-deoxyguanosine 3'-phosphorothioate
  modified_base 6: mod_base = OTHER; note = 5-methyl-2'-deoxycytidine 3'-phosphorothioate
  modified_base 7: mod_base = OTHER; note = 2'-deoxyadenosine 3'-phosphorothioate
  modified_base 8: mod_base = OTHER; note = 5-methyl-2'-deoxycytidine 3'-phosphorothioate
  modified_base 9: mod_base = OTHER; note = 2'-deoxythymidine 3'-phosphorothioate
  modified_base 10..11: mod_base = OTHER; note = 5-methyl-2'-deoxycytidine 3'-phosphorothioate
  modified_base 12: mod_base = OTHER; note = 5-methyl-2'-deoxycytidine 3'-phosphorothioate
  modified_base 13: mod_base = OTHER; note = 2'-deoxythymidine 3'-phosphorothioate
  modified_base 14: mod_base = OTHER; note = cEt thymidine 3'-phosphorothioate
  modified_base 15: mod_base = OTHER; note = cEt guanosine 3'-phosphorothioate
  modified_base 16: mod_base = OTHER; note = cEt thymidine
ccctgcactccattgt

SEQ ID NO: 1156 - DNA, 16 bp, synthetic construct
  source 1..16: mol_type = other DNA
  modified_base 1..3: mod_base = OTHER; note = cEt 5-methylcytidine 3'-phosphorothioate
  modified_base 4..5: mod_base = OTHER; note = 5-methyl-2'-deoxycytidine 3'-phosphorothioate
  modified_base 6: mod_base = OTHER; note = 2'-deoxythymidine 3'-phosphorothioate
  modified_base 7: mod_base = OTHER; note = 2'-deoxyguanosine 3'-phosphorothioate
  modified_base 8: mod_base = OTHER; note = 5-methyl-2'-deoxycytidine 3'-phosphorothioate
  modified_base 9: mod_base = OTHER; note = 2'-deoxyadenosine 3'-phosphorothioate
  modified_base 10: mod_base = OTHER; note = 5-methyl-2'-deoxycytidine 3'-phosphorothioate
  modified_base 11: mod_base = OTHER; note = 2'-deoxythymidine 3'-phosphorothioate
  modified_base 12..13: mod_base = OTHER; note = 5-methyl-2'-deoxycytidine 3'-phosphorothioate
  modified_base 14: mod_base = OTHER; note = cEt adenosine 3'-phosphorothioate
  modified_base 15: mod_base = OTHER; note = cEt thymidine 3'-phosphorothioate
  modified_base 16: mod_base = OTHER; note = cEt thymidine
ccccctgcactccatt

SEQ ID NO: 1157 - DNA, 16 bp, synthetic construct
  source 1..16: mol_type = other DNA
  modified_base 1: mod_base = OTHER; note = cEt 5-methylcytidine 3'-phosphorothioate
  modified_base 2..3: mod_base = OTHER; note = cEt thymidine 3'-phosphorothioate
  modified_base 4: mod_base = OTHER; note = 2'-deoxyguanosine 3'-phosphorothioate
  modified_base 5: mod_base = OTHER; note = 5-methyl-2'-deoxycytidine 3'-phosphorothioate
  modified_base 6: mod_base = OTHER; note = 2'-deoxythymidine 3'-phosphorothioate
  modified_base 7: mod_base = OTHER; note = 2'-deoxyguanosine 3'-phosphorothioate
  modified_base 8: mod_base = OTHER; note = 2'-deoxyadenosine 3'-phosphorothioate
  modified_base 9: mod_base = OTHER; note = 2'-deoxyguanosine 3'-phosphorothioate
  modified_base 10: mod_base = OTHER; note = 2'-deoxythymidine 3'-phosphorothioate
  modified_base 11: mod_base = OTHER; note = 5-methyl-2'-deoxycytidine 3'-phosphorothioate
  modified_base 12: mod_base = OTHER; note = 2'-deoxyadenosine 3'-phosphorothioate
  modified_base 13: mod_base = OTHER; note = 2'-deoxyguanosine 3'-phosphorothioate
  modified_base 14: mod_base = OTHER; note = cEt guanosine 3'-phosphorothioate
  modified_base 15: mod_base = OTHER; note = cEt adenosine 3'-phosphorothioate
  modified_base 16: mod_base = OTHER; note = cEt guanosine
cttgctgagtcaggag

SEQ ID NO: 1158 - DNA, 16 bp, synthetic construct
  source 1..16: mol_type = other DNA
  modified_base 1: mod_base = OTHER; note = cEt thymidine 3'-phosphorothioate
  modified_base 2..3: mod_base = OTHER; note = cEt 5-methylcytidine 3'-phosphorothioate
  modified_base 4..5: mod_base = OTHER; note = 2'-deoxythymidine 3'-phosphorothioate
  modified_base 6: mod_base = OTHER; note = 2'-deoxyguanosine 3'-phosphorothioate
  modified_base 7: mod_base = OTHER; note = 5-methyl-2'-deoxycytidine 3'-phosphorothioate
  modified_base 8: mod_base = OTHER; note = 2'-deoxythymidine 3'-phosphorothioate
  modified_base 9: mod_base = OTHER; note = 2'-deoxyguanosine 3'-phosphorothioate
  modified_base 10: mod_base = OTHER; note = 2'-deoxyadenosine 3'-phosphorothioate
  modified_base 11: mod_base = OTHER; note = 2'-deoxyguanosine 3'-phosphorothioate
  modified_base 12: mod_base = OTHER; note = 2'-deoxythymidine 3'-phosphorothioate
  modified_base 13: mod_base = OTHER; note = 5-methyl-2'-deoxycytidine 3'-phosphorothioate
  modified_base 14: mod_base = OTHER; note = cEt adenosine 3'-phosphorothioate
  modified_base 15: mod_base = OTHER; note = cEt guanosine 3'-phosphorothioate
  modified_base 16: mod_base = OTHER; note = cEt guanosine
tccttgctgagtcagg

SEQ ID NO: 1159 - DNA, 16 bp, synthetic construct
  source 1..16: mol_type = other DNA
  modified_base 1: mod_base = OTHER; note = cEt 5-methylcytidine 3'-phosphorothioate
  modified_base 2..3: mod_base = OTHER; note = cEt thymidine 3'-phosphorothioate
  modified_base 4..5: mod_base = OTHER; note = 5-methyl-2'-deoxycytidine 3'-phosphorothioate
  modified_base 6..7: mod_base = OTHER; note = 2'-deoxythymidine 3'-phosphorothioate
  modified_base 8: mod_base = OTHER; note = 2'-deoxyguanosine 3'-phosphorothioate
  modified_base 9: mod_base = OTHER; note = 5-methyl-2'-deoxycytidine 3'-phosphorothioate
  modified_base 10: mod_base = OTHER; note = 2'-deoxythymidine 3'-phosphorothioate
  modified_base 11: mod_base = OTHER; note = 2'-deoxyguanosine 3'-phosphorothioate
  modified_base 12: mod_base = OTHER; note = 2'-deoxyadenosine 3'-phosphorothioate
  modified_base 13: mod_base = OTHER; note = 2'-deoxyguanosine 3'-phosphorothioate
  modified_base 14: mod_base = OTHER; note = cEt thymidine 3'-phosphorothioate
  modified_base 15: mod_base = OTHER; note = cEt 5-methylcytidine 3'-phosphorothioate
  modified_base 16: mod_base = OTHER; note = cEt adenosine
cttccttgctgagtca

SEQ ID NO: 1160 - DNA, 16 bp, synthetic construct
  source 1..16: mol_type = other DNA
  modified_base 1: mod_base = OTHER; note = cEt adenosine 3'-phosphorothioate
  modified_base 2..3: mod_base = OTHER; note = cEt 5-methylcytidine 3'-phosphorothioate
  modified_base 4..5: mod_base = OTHER; note = 2'-deoxythymidine 3'-phosphorothioate
  modified_base 6..7: mod_base = OTHER; note = 5-methyl-2'-deoxycytidine 3'-phosphorothioate
  modified_base 8..9: mod_base = OTHER; note = 2'-deoxythymidine 3'-phosphorothioate
  modified_base 10: mod_base = OTHER; note = 2'-deoxyguanosine 3'-phosphorothioate
  modified_base 11: mod_base = OTHER; note = 5-methyl-2'-deoxycytidine 3'-phosphorothioate
  modified_base 12: mod_base = OTHER; note = 2'-deoxythymidine 3'-phosphorothioate
  modified_base 13: mod_base = OTHER; note = 2'-deoxyguanosine 3'-phosphorothioate
  modified_base 14: mod_base = OTHER; note = cEt adenosine 3'-phosphorothioate
  modified_base 15: mod_base = OTHER; note = cEt guanosine 3'-phosphorothioate
  modified_base 16: mod_base = OTHER; note = cEt thymidine
accttccttgctgagt

SEQ ID NO: 1161 - DNA, 16 bp, synthetic construct
  source 1..16: mol_type = other DNA
  modified_base 1..2: mod_base = OTHER; note = cEt guanosine 3'-phosphorothioate
  modified_base 3: mod_base = OTHER; note = cEt adenosine 3'-phosphorothioate
  modified_base 4..5: mod_base = OTHER; note = 5-methyl-2'-deoxycytidine 3'-phosphorothioate
  modified_base 6..7: mod_base = OTHER; note = 2'-deoxythymidine 3'-phosphorothioate
  modified_base 8..9: mod_base = OTHER; note = 5-methyl-2'-deoxycytidine 3'-phosphorothioate
  modified_base 10..11: mod_base = OTHER; note = 2'-deoxythymidine 3'-phosphorothioate
  modified_base 12: mod_base = OTHER; note = 2'-deoxyguanosine 3'-phosphorothioate
  modified_base 13: mod_base = OTHER; note = 5-methyl-2'-deoxycytidine 3'-phosphorothioate
  modified_base 14: mod_base = OTHER; note = cEt thymidine 3'-phosphorothioate
  modified_base 15: mod_base = OTHER; note = cEt guanosine 3'-phosphorothioate
  modified_base 16: mod_base = OTHER; note = cEt adenosine
ggaccttccttgctga

SEQ ID NO: 1162 - DNA, 16 bp, synthetic construct
  source 1..16: mol_type = other DNA
  modified_base 1: mod_base = OTHER; note = cEt 5-methylcytidine 3'-phosphorothioate
  modified_base 2: mod_base = OTHER; note = cEt adenosine 3'-phosphorothioate
  modified_base 3: mod_base = OTHER; note = cEt guanosine 3'-phosphorothioate
  modified_base 4: mod_base = OTHER; note = 2'-deoxyguanosine 3'-phosphorothioate
  modified_base 5: mod_base = OTHER; note = 2'-deoxyadenosine 3'-phosphorothioate
  modified_base 6..7: mod_base = OTHER; note = 5-methyl-2'-deoxycytidine 3'-phosphorothioate
  modified_base 8..9: mod_base = OTHER; note = 2'-deoxythymidine 3'-phosphorothioate
  modified_base 10..11: mod_base = OTHER; note = 5-methyl-2'-deoxycytidine 3'-phosphorothioate
  modified_base 12..13: mod_base = OTHER; note = 2'-deoxythymidine 3'-phosphorothioate
  modified_base 14: mod_base = OTHER; note = cEt guanosine 3'-phosphorothioate
  modified_base 15: mod_base = OTHER; note = cEt 5-methylcytidine 3'-phosphorothioate
  modified_base 16: mod_base = OTHER; note = cEt thymidine
caggaccttccttgct

SEQ ID NO: 1163 - DNA, 16 bp, synthetic construct
  source 1..16: mol_type = other DNA
  modified_base 1: mod_base = OTHER; note = cEt adenosine 3'-phosphorothioate
  modified_base 2: mod_base = OTHER; note = cEt guanosine 3'-phosphorothioate
  modified_base 3: mod_base = OTHER; note = cEt 5-methylcytidine 3'-phosphorothioate
  modified_base 4..5: mod_base = OTHER; note = 5-methyl-2'-deoxycytidine 3'-phosphorothioate
  modified_base 6: mod_base = OTHER; note = 2'-deoxythymidine 3'-phosphorothioate
  modified_base 7..8: mod_base = OTHER; note = 5-methyl-2'-deoxycytidine 3'-phosphorothioate
  modified_base 9: mod_base = OTHER; note = 2'-deoxyadenosine 3'-phosphorothioate
  modified_base 10..11: mod_base = OTHER; note = 2'-deoxyguanosine 3'-phosphorothioate
  modified_base 12: mod_base = OTHER; note = 2'-deoxyadenosine 3'-phosphorothioate
  modified_base 13: mod_base = OTHER; note = 5-methyl-2'-deoxycytidine 3'-phosphorothioate
  modified_base 14: mod_base = OTHER; note = cEt 5-methylcytidine 3'-phosphorothioate
  modified_base 15: mod_base = OTHER; note = cEt thymidine 3'-phosphorothioate
  modified_base 16: mod_base = OTHER; note = cEt thymidine
agccctccaggacctt

SEQ ID NO: 1164 - DNA, 16 bp, synthetic construct
  source 1..16: mol_type = other DNA
  modified_base 1: mod_base = OTHER; note = cEt thymidine 3'-phosphorothioate
  modified_base 2: mod_base = OTHER; note = cEt adenosine 3'-phosphorothioate
  modified_base 3: mod_base = OTHER; note = cEt guanosine 3'-phosphorothioate
  modified_base 4: mod_base = OTHER; note = 5-methyl-2'-deoxycytidine 3'-phosphorothioate
  modified_base 5: mod_base = OTHER; note = 2'-deoxythymidine 3'-phosphorothioate
  modified_base 6..9: mod_base = OTHER; note = 5-methyl-2'-deoxycytidine 3'-phosphorothioate
  modified_base 10: mod_base = OTHER; note = 2'-deoxyadenosine 3'-phosphorothioate
  modified_base 11: mod_base = OTHER; note = 5-methyl-2'-deoxycytidine 3'-phosphorothioate
  modified_base 12: mod_base = OTHER; note = 2'-deoxythymidine 3'-phosphorothioate
  modified_base 13: mod_base = OTHER; note = 5-methyl-2'-deoxycytidine 3'-phosphorothioate
  modified_base 14: mod_base = OTHER; note = cEt 5-methylcytidine 3'-phosphorothioate
  modified_base 15: mod_base = OTHER; note = cEt adenosine 3'-phosphorothioate
  modified_base 16: mod_base = OTHER; note = cEt guanosine
tagctccccactccag

SEQ ID NO: 1165 - DNA, 16 bp, synthetic construct
  source 1..16: mol_type = other DNA
  modified_base 1: mod_base = OTHER; note = cEt guanosine 3'-phosphorothioate
  modified_base 2: mod_base = OTHER; note = cEt adenosine 3'-phosphorothioate
  modified_base 3: mod_base = OTHER; note = cEt thymidine 3'-phosphorothioate
  modified_base 4: mod_base = OTHER; note = 2'-deoxyadenosine 3'-phosphorothioate
  modified_base 5: mod_base = OTHER; note = 2'-deoxyguanosine 3'-phosphorothioate
  modified_base 6: mod_base = OTHER; note = 5-methyl-2'-deoxycytidine 3'-phosphorothioate
  modified_base 7: mod_base = OTHER; note = 2'-deoxythymidine 3'-phosphorothioate
  modified_base 8..11: mod_base = OTHER; note = 5-methyl-2'-deoxycytidine 3'-phosphorothioate
  modified_base 12: mod_base = OTHER; note = 2'-deoxyadenosine 3'-phosphorothioate
  modified_base 13: mod_base = OTHER; note = 5-methyl-2'-deoxycytidine 3'-phosphorothioate
  modified_base 14: mod_base = OTHER; note = cEt thymidine 3'-phosphorothioate
  modified_base 15: mod_base = OTHER; note = cEt 5-methylcytidine 3'-phosphorothioate
  modified_base 16: mod_base = OTHER; note = cEt 5-methylcytidine
gatagctccccactcc

SEQ ID NO: 1166 - DNA, 16 bp, synthetic construct
  source 1..16: mol_type = other DNA
  modified_base 1: mod_base = OTHER; note = cEt 5-methylcytidine 3'-phosphorothioate
  modified_base 2: mod_base = OTHER; note = cEt adenosine 3'-phosphorothioate
  modified_base 3: mod_base = OTHER; note = cEt guanosine 3'-phosphorothioate
  modified_base 4: mod_base = OTHER; note = 2'-deoxyadenosine 3'-phosphorothioate
  modified_base 5: mod_base = OTHER; note = 2'-deoxythymidine 3'-phosphorothioate
  modified_base 6: mod_base = OTHER; note = 2'-deoxyadenosine 3'-phosphorothioate
  modified_base 7: mod_base = OTHER; note = 2'-deoxyguanosine 3'-phosphorothioate
  modified_base 8: mod_base = OTHER; note = 5-methyl-2'-deoxycytidine 3'-phosphorothioate
  modified_base 9: mod_base = OTHER; note = 2'-deoxythymidine 3'-phosphorothioate
  modified_base 10..13: mod_base = OTHER; note = 5-methyl-2'-deoxycytidine 3'-phosphorothioate
  modified_base 14: mod_base = OTHER; note = cEt adenosine 3'-phosphorothioate
  modified_base 15: mod_base = OTHER; note = cEt 5-methylcytidine 3'-phosphorothioate
  modified_base 16: mod_base = OTHER; note = cEt thymidine
cagatagctccccact

SEQ ID NO: 1167 - DNA, 16 bp, synthetic construct
  source 1..16: mol_type = other DNA
  modified_base 1: mod_base = OTHER; note = cEt 5-methylcytidine 3'-phosphorothioate
  modified_base 3: mod_base = OTHER; note = cEt 5-methylcytidine 3'-phosphorothioate
  modified_base 2: mod_base = OTHER; note = cEt thymidine 3'-phosphorothioate
  modified_base 4: mod_base = OTHER; note = 2'-deoxyadenosine 3'-phosphorothioate
  modified_base 6: mod_base = OTHER; note = 2'-deoxyadenosine 3'-phosphorothioate
  modified_base 8: mod_base = OTHER; note = 2'-deoxyadenosine 3'-phosphorothioate
  modified_base 5: mod_base = OTHER; note = 2'-deoxyguanosine 3'-phosphorothioate
  modified_base 7: mod_base = OTHER; note = 2'-deoxythymidine 3'-phosphorothioate
  modified_base 9: mod_base = OTHER; note = 2'-deoxyguanosine 3'-phosphorothioate
  modified_base 10: mod_base = OTHER; note = 5-methyl-2'-deoxycytidine 3'-phosphorothioate
  modified_base 11: mod_base = OTHER; note = 2'-deoxythymidine 3'-phosphorothioate
  modified_base 12..13: mod_base = OTHER; note = 5-methyl-2'-deoxycytidine 3'-phosphorothioate
  modified_base 14..15: mod_base = OTHER; note = cEt 5-methylcytidine 3'-phosphorothioate
  modified_base 16: mod_base = OTHER; note = cEt adenosine
ctcagatagctcccca

SEQ ID NO: 1168 - DNA, 16 bp, synthetic construct
  source 1..16: mol_type = other DNA
  modified_base 1: mod_base = OTHER; note = cEt adenosine 3'-phosphorothioate
  modified_base 2: mod_base = OTHER; note = cEt guanosine 3'-phosphorothioate
  modified_base 3: mod_base = OTHER; note = cEt 5-methylcytidine 3'-phosphorothioate
  modified_base 4: mod_base = OTHER; note = 2'-deoxythymidine 3'-phosphorothioate
  modified_base 5: mod_base = OTHER; note = 5-methyl-2'-deoxycytidine 3'-phosphorothioate
  modified_base 6: mod_base = OTHER; note = 2'-deoxyadenosine 3'-phosphorothioate
  modified_base 7: mod_base = OTHER; note = 2'-deoxyguanosine 3'-phosphorothioate
  modified_base 8: mod_base = OTHER; note = 2'-deoxyadenosine 3'-phosphorothioate
  modified_base 9: mod_base = OTHER; note = 2'-deoxythymidine 3'-phosphorothioate
  modified_base 10: mod_base = OTHER; note = 2'-deoxyadenosine 3'-phosphorothioate
  modified_base 11: mod_base = OTHER; note = 2'-deoxyguanosine 3'-phosphorothioate
  modified_base 12: mod_base = OTHER; note = 5-methyl-2'-deoxycytidine 3'-phosphorothioate
  modified_base 13: mod_base = OTHER; note = 2'-deoxythymidine 3'-phosphorothioate
  modified_base 14..15: mod_base = OTHER; note = cEt 5-methylcytidine 3'-phosphorothioate
  modified_base 16: mod_base = OTHER; note = cEt 5-methylcytidine
agctcagatagctccc

SEQ ID NO: 1169 - DNA, 16 bp, synthetic construct
  source 1..16: mol_type = other DNA
  modified_base 1: mod_base = OTHER; note = cEt thymidine 3'-phosphorothioate
  modified_base 2: mod_base = OTHER; note = cEt 5-methylcytidine 3'-phosphorothioate
  modified_base 3: mod_base = OTHER; note = cEt adenosine 3'-phosphorothioate
  modified_base 4: mod_base = OTHER; note = 2'-deoxyguanosine 3'-phosphorothioate
  modified_base 5: mod_base = OTHER; note = 5-methyl-2'-deoxycytidine 3'-phosphorothioate
  modified_base 6: mod_base = OTHER; note = 2'-deoxythymidine 3'-phosphorothioate
  modified_base 7: mod_base = OTHER; note = 5-methyl-2'-deoxycytidine 3'-phosphorothioate
  modified_base 8: mod_base = OTHER; note = 2'-deoxyadenosine 3'-phosphorothioate
  modified_base 9: mod_base = OTHER; note = 2'-deoxyguanosine 3'-phosphorothioate
  modified_base 10: mod_base = OTHER; note = 2'-deoxyadenosine 3'-phosphorothioate
  modified_base 11: mod_base = OTHER; note = 2'-deoxythymidine 3'-phosphorothioate
  modified_base 12: mod_base = OTHER; note = 2'-deoxyadenosine 3'-phosphorothioate
  modified_base 13: mod_base = OTHER; note = 2'-deoxyguanosine 3'-phosphorothioate
  modified_base 14: mod_base = OTHER; note = cEt 5-methylcytidine 3'-phosphorothioate
  modified_base 15: mod_base = OTHER; note = cEt thymidine 3'-phosphorothioate
  modified_base 16: mod_base = OTHER; note = cEt 5-methylcytidine
tcagctcagatagctc

SEQ ID NO: 1170 - DNA, 16 bp, synthetic construct
  source 1..16: mol_type = other DNA
  modified_base 1: mod_base = OTHER; note = cEt thymidine 3'-phosphorothioate
  modified_base 3: mod_base = OTHER; note = cEt thymidine 3'-phosphorothioate
  modified_base 2: mod_base = OTHER; note = cEt 5-methylcytidine 3'-phosphorothioate
  modified_base 4: mod_base = OTHER; note = 5-methyl-2'-deoxycytidine 3'-phosphorothioate
  modified_base 5: mod_base = OTHER; note = 2'-deoxyadenosine 3'-phosphorothioate
  modified_base 6: mod_base = OTHER; note = 2'-deoxyguanosine 3'-phosphorothioate
  modified_base 7: mod_base = OTHER; note = 5-methyl-2'-deoxycytidine 3'-phosphorothioate
  modified_base 8: mod_base = OTHER; note = 2'-deoxythymidine 3'-phosphorothioate
  modified_base 9: mod_base = OTHER; note = 5-methyl-2'-deoxycytidine 3'-phosphorothioate
  modified_base 10: mod_base = OTHER; note = 2'-deoxyadenosine 3'-phosphorothioate
  modified_base 11: mod_base = OTHER; note = 2'-deoxyguanosine 3'-phosphorothioate
  modified_base 12: mod_base = OTHER; note = 2'-deoxyadenosine 3'-phosphorothioate
  modified_base 13: mod_base = OTHER; note = 2'-deoxythymidine 3'-phosphorothioate
  modified_base 14: mod_base = OTHER; note = cEt adenosine 3'-phosphorothioate
  modified_base 15: mod_base = OTHER; note = cEt guanosine 3'-phosphorothioate
  modified_base 16: mod_base = OTHER; note = cEt 5-methylcytidine
tctcagctcagatagc

SEQ ID NO: 1171 - DNA, 16 bp, synthetic construct
  source 1..16: mol_type = other DNA
  modified_base 1: mod_base = OTHER; note = cEt guanosine 3'-phosphorothioate
  modified_base 3: mod_base = OTHER; note = cEt guanosine 3'-phosphorothioate
  modified_base 2: mod_base = OTHER; note = cEt adenosine 3'-phosphorothioate
  modified_base 4: mod_base = OTHER; note = 2'-deoxythymidine 3'-phosphorothioate
  modified_base 5..6: mod_base = OTHER; note = 5-methyl-2'-deoxycytidine 3'-phosphorothioate
  modified_base 7: mod_base = OTHER; note = 2'-deoxythymidine 3'-phosphorothioate
  modified_base 8: mod_base = OTHER; note = 5-methyl-2'-deoxycytidine 3'-phosphorothioate
  modified_base 9: mod_base = OTHER; note = 2'-deoxythymidine 3'-phosphorothioate
  modified_base 10..11: mod_base = OTHER; note = 5-methyl-2'-deoxycytidine 3'-phosphorothioate
  modified_base 12: mod_base = OTHER; note = 2'-deoxythymidine 3'-phosphorothioate
  modified_base 13: mod_base = OTHER; note = 2'-deoxyguanosine 3'-phosphorothioate
  modified_base 14: mod_base = OTHER; note = cEt 5-methylcytidine 3'-phosphorothioate
  modified_base 15: mod_base = OTHER; note = cEt thymidine 3'-phosphorothioate
  modified_base 16: mod_base = OTHER; note = cEt thymidine
gagtcctctcctgctt

SEQ ID NO: 1172 - DNA, 16 bp, synthetic construct
  source 1..16: mol_type = other DNA
  modified_base 1..2: mod_base = OTHER; note = cEt guanosine 3'-phosphorothioate
  modified_base 3: mod_base = OTHER; note = cEt adenosine 3'-phosphorothioate
  modified_base 4..5: mod_base = OTHER; note = 2'-deoxyguanosine 3'-phosphorothioate
  modified_base 6: mod_base = OTHER; note = 2'-deoxyadenosine 3'-phosphorothioate
  modified_base 7: mod_base = OTHER; note = 2'-deoxyguanosine 3'-phosphorothioate
  modified_base 8: mod_base = OTHER; note = 2'-deoxythymidine 3'-phosphorothioate
  modified_base 9..10: mod_base = OTHER; note = 5-methyl-2'-deoxycytidine 3'-phosphorothioate
  modified_base 11: mod_base = OTHER; note = 2'-deoxythymidine 3'-phosphorothioate
  modified_base 12: mod_base = OTHER; note = 5-methyl-2'-deoxycytidine 3'-phosphorothioate
  modified_base 13: mod_base = OTHER; note = 2'-deoxythymidine 3'-phosphorothioate
  modified_base 14..15: mod_base = OTHER; note = cEt 5-methylcytidine 3'-phosphorothioate
  modified_base 16: mod_base = OTHER; note = cEt thymidine
ggaggagtcctctcct

SEQ ID NO: 1173 - DNA, 16 bp, synthetic construct
  source 1..16: mol_type = other DNA
  modified_base 1: mod_base = OTHER; note = cEt guanosine 3'-phosphorothioate
  modified_base 3: mod_base = OTHER; note = cEt guanosine 3'-phosphorothioate
  modified_base 2: mod_base = OTHER; note = cEt adenosine 3'-phosphorothioate
  modified_base 4: mod_base = OTHER; note = 2'-deoxyguanosine 3'-phosphorothioate
  modified_base 5: mod_base = OTHER; note = 2'-deoxyadenosine 3'-phosphorothioate
  modified_base 6..7: mod_base = OTHER; note = 2'-deoxyguanosine 3'-phosphorothioate
  modified_base 8: mod_base = OTHER; note = 2'-deoxyadenosine 3'-phosphorothioate
  modified_base 9: mod_base = OTHER; note = 2'-deoxyguanosine 3'-phosphorothioate
  modified_base 10: mod_base = OTHER; note = 2'-deoxythymidine 3'-phosphorothioate
  modified_base 11..12: mod_base = OTHER; note = 5-methyl-2'-deoxycytidine 3'-phosphorothioate
  modified_base 13: mod_base = OTHER; note = 2'-deoxythymidine 3'-phosphorothioate
  modified_base 14: mod_base = OTHER; note = cEt 5-methylcytidine 3'-phosphorothioate
  modified_base 15: mod_base = OTHER; note = cEt thymidine 3'-phosphorothioate
  modified_base 16: mod_base = OTHER; note = cEt 5-methylcytidine
gaggaggagtcctctc

SEQ ID NO: 1174 - DNA, 16 bp, synthetic construct
  source 1..16: mol_type = other DNA
  modified_base 1: mod_base = OTHER; note = cEt 5-methylcytidine 3'-phosphorothioate
  modified_base 2..3: mod_base = OTHER; note = cEt adenosine 3'-phosphorothioate
  modified_base 4..5: mod_base = OTHER; note = 2'-deoxyadenosine 3'-phosphorothioate
  modified_base 6..8: mod_base = OTHER; note = 2'-deoxyguanosine 3'-phosphorothioate
  modified_base 9: mod_base = OTHER; note = 5-methyl-2'-deoxycytidine 3'-phosphorothioate
  modified_base 10: mod_base = OTHER; note = 2'-deoxyadenosine 3'-phosphorothioate
  modified_base 11..13: mod_base = OTHER; note = 5-methyl-2'-deoxycytidine 3'-phosphorothioate
  modified_base 14: mod_base = OTHER; note = cEt adenosine 3'-phosphorothioate
  modified_base 15: mod_base = OTHER; note = cEt guanosine 3'-phosphorothioate
  modified_base 16: mod_base = OTHER; note = cEt adenosine
caaaagggcacccaga

SEQ ID NO: 1175 - DNA, 16 bp, synthetic construct
  source 1..16: mol_type = other DNA
  modified_base 1: mod_base = OTHER; note = cEt adenosine 3'-phosphorothioate
  modified_base 2: mod_base = OTHER; note = cEt guanosine 3'-phosphorothioate
  modified_base 3: mod_base = OTHER; note = cEt 5-methylcytidine 3'-phosphorothioate
  modified_base 4..7: mod_base = OTHER; note = 2'-deoxyadenosine 3'-phosphorothioate
  modified_base 8..10: mod_base = OTHER; note = 2'-deoxyguanosine 3'-phosphorothioate
  modified_base 11: mod_base = OTHER; note = 5-methyl-2'-deoxycytidine 3'-phosphorothioate
  modified_base 13: mod_base = OTHER; note = 5-methyl-2'-deoxycytidine 3'-phosphorothioate
  modified_base 12: mod_base = OTHER; note = 2'-deoxyadenosine 3'-phosphorothioate
  modified_base 14..15: mod_base = OTHER; note = cEt 5-methylcytidine 3'-phosphorothioate
  modified_base 16: mod_base = OTHER; note = cEt adenosine
agcaaaagggcaccca

SEQ ID NO: 1176 - DNA, 16 bp, synthetic construct
  source 1..16: mol_type = other DNA
  modified_base 1..2: mod_base = OTHER; note = cEt guanosine 3'-phosphorothioate
  modified_base 3: mod_base = OTHER; note = cEt adenosine 3'-phosphorothioate
  modified_base 4: mod_base = OTHER; note = 2'-deoxythymidine 3'-phosphorothioate
  modified_base 5..8: mod_base = OTHER; note = 5-methyl-2'-deoxycytidine 3'-phosphorothioate
  modified_base 9: mod_base = OTHER; note = 2'-deoxyadenosine 3'-phosphorothioate
  modified_base 10: mod_base = OTHER; note = 2'-deoxyguanosine 3'-phosphorothioate
  modified_base 11: mod_base = OTHER; note = 2'-deoxythymidine 3'-phosphorothioate
  modified_base 13: mod_base = OTHER; note = 2'-deoxythymidine 3'-phosphorothioate
  modified_base 12: mod_base = OTHER; note = 2'-deoxyadenosine 3'-phosphorothioate
  modified_base 14: mod_base = OTHER; note = cEt thymidine 3'-phosphorothioate
  modified_base 15: mod_base = OTHER; note = cEt guanosine 3'-phosphorothioate
  modified_base 16: mod_base = OTHER; note = cEt thymidine
ggatccccagtattgt

SEQ ID NO: 1177 - DNA, 16 bp, synthetic construct
  source 1..16: mol_type = other DNA
  modified_base 1: mod_base = OTHER; note = cEt 5-methylcytidine 3'-phosphorothioate
  modified_base 2: mod_base = OTHER; note = cEt thymidine 3'-phosphorothioate
  modified_base 3: mod_base = OTHER; note = cEt guanosine 3'-phosphorothioate
  modified_base 4: mod_base = OTHER; note = 2'-deoxyguanosine 3'-phosphorothioate
  modified_base 5: mod_base = OTHER; note = 2'-deoxyadenosine 3'-phosphorothioate
  modified_base 6: mod_base = OTHER; note = 2'-deoxythymidine 3'-phosphorothioate
  modified_base 7..10: mod_base = OTHER; note = 5-methyl-2'-deoxycytidine 3'-phosphorothioate
  modified_base 11: mod_base = OTHER; note = 2'-deoxyadenosine 3'-phosphorothioate
  modified_base 12: mod_base = OTHER; note = 2'-deoxyguanosine 3'-phosphorothioate
  modified_base 13: mod_base = OTHER; note = 2'-deoxythymidine 3'-phosphorothioate
  modified_base 14: mod_base = OTHER; note = cEt adenosine 3'-phosphorothioate
  modified_base 15: mod_base = OTHER; note = cEt thymidine 3'-phosphorothioate
  modified_base 16: mod_base = OTHER; note = cEt thymidine
ctggatccccagtatt

SEQ ID NO: 1178 - DNA, 16 bp, synthetic construct
  source 1..16: mol_type = other DNA
  modified_base 1: mod_base = OTHER; note = cEt thymidine 3'-phosphorothioate
  modified_base 2: mod_base = OTHER; note = cEt guanosine 3'-phosphorothioate
  modified_base 3: mod_base = OTHER; note = cEt 5-methylcytidine 3'-phosphorothioate
  modified_base 4: mod_base = OTHER; note = 2'-deoxythymidine 3'-phosphorothioate
  modified_base 5..6: mod_base = OTHER; note = 2'-deoxyguanosine 3'-phosphorothioate
  modified_base 7: mod_base = OTHER; note = 2'-deoxyadenosine 3'-phosphorothioate
  modified_base 8: mod_base = OTHER; note = 2'-deoxythymidine 3'-phosphorothioate
  modified_base 9..12: mod_base = OTHER; note = 5-methyl-2'-deoxycytidine 3'-phosphorothioate
  modified_base 13: mod_base = OTHER; note = 2'-deoxyadenosine 3'-phosphorothioate
  modified_base 14: mod_base = OTHER; note = cEt guanosine 3'-phosphorothioate
  modified_base 15: mod_base = OTHER; note = cEt thymidine 3'-phosphorothioate
  modified_base 16: mod_base = OTHER; note = cEt adenosine
tgctggatccccagta

SEQ ID NO: 1179 - DNA, 16 bp, synthetic construct
  source 1..16: mol_type = other DNA
  modified_base 1: mod_base = OTHER; note = cEt adenosine 3'-phosphorothioate
  modified_base 2..3: mod_base = OTHER; note = cEt thymidine 3'-phosphorothioate
  modified_base 4: mod_base = OTHER; note = 5-methyl-2'-deoxycytidine 3'-phosphorothioate
  modified_base 5: mod_base = OTHER; note = 2'-deoxythymidine 3'-phosphorothioate
  modified_base 6: mod_base = OTHER; note = 5-methyl-2'-deoxycytidine 3'-phosphorothioate
  modified_base 7: mod_base = OTHER; note = 2'-deoxythymidine 3'-phosphorothioate
  modified_base 8: mod_base = OTHER; note = 2'-deoxyadenosine 3'-phosphorothioate
  modified_base 9: mod_base = OTHER; note = 2'-deoxyguanosine 3'-phosphorothioate
  modified_base 10: mod_base = OTHER; note = 2'-deoxyadenosine 3'-phosphorothioate
  modified_base 11: mod_base = OTHER; note = 5-methyl-2'-deoxycytidine 3'-phosphorothioate
  modified_base 12: mod_base = OTHER; note = 2'-deoxythymidine 3'-phosphorothioate
  modified_base 13: mod_base = OTHER; note = 2'-deoxyguanosine 3'-phosphorothioate
  modified_base 14: mod_base = OTHER; note = cEt 5-methylcytidine 3'-phosphorothioate
  modified_base 15: mod_base = OTHER; note = cEt adenosine 3'-phosphorothioate
  modified_base 16: mod_base = OTHER; note = cEt adenosine
attctctagactgcaa

SEQ ID NO: 1180 - DNA, 16 bp, synthetic construct
  source 1..16: mol_type = other DNA
  modified_base 1: mod_base = OTHER; note = cEt thymidine 3'-phosphorothioate
  modified_base 2..3: mod_base = OTHER; note = cEt adenosine 3'-phosphorothioate
  modified_base 4..5: mod_base = OTHER; note = 2'-deoxythymidine 3'-phosphorothioate
  modified_base 6: mod_base = OTHER; note = 5-methyl-2'-deoxycytidine 3'-phosphorothioate
  modified_base 7: mod_base = OTHER; note = 2'-deoxythymidine 3'-phosphorothioate
  modified_base 8: mod_base = OTHER; note = 5-methyl-2'-deoxycytidine 3'-phosphorothioate
  modified_base 9: mod_base = OTHER; note = 2'-deoxythymidine 3'-phosphorothioate
  modified_base 10: mod_base = OTHER; note = 2'-deoxyadenosine 3'-phosphorothioate
  modified_base 11: mod_base = OTHER; note = 2'-deoxyguanosine 3'-phosphorothioate
  modified_base 12: mod_base = OTHER; note = 2'-deoxyadenosine 3'-phosphorothioate
  modified_base 13: mod_base = OTHER; note = 5-methyl-2'-deoxycytidine 3'-phosphorothioate
  modified_base 14: mod_base = OTHER; note = cEt thymidine 3'-phosphorothioate
  modified_base 15: mod_base = OTHER; note = cEt guanosine 3'-phosphorothioate
  modified_base 16: mod_base = OTHER; note = cEt 5-methylcytidine
taattctctagactgc

SEQ ID NO: 1181 - DNA, 16 bp, synthetic construct
  source 1..16: mol_type = other DNA
  modified_base 1: mod_base = OTHER; note = cEt thymidine 3'-phosphorothioate
  modified_base 3: mod_base = OTHER; note = cEt thymidine 3'-phosphorothioate
  modified_base 2: mod_base = OTHER; note = cEt 5-methylcytidine 3'-phosphorothioate
  modified_base 4..5: mod_base = OTHER; note = 2'-deoxyadenosine 3'-phosphorothioate
  modified_base 6..7: mod_base = OTHER; note = 2'-deoxythymidine 3'-phosphorothioate
  modified_base 8: mod_base = OTHER; note = 5-methyl-2'-deoxycytidine 3'-phosphorothioate
  modified_base 9: mod_base = OTHER; note = 2'-deoxythymidine 3'-phosphorothioate
  modified_base 10: mod_base = OTHER; note = 5-methyl-2'-deoxycytidine 3'-phosphorothioate
  modified_base 11: mod_base = OTHER; note = 2'-deoxythymidine 3'-phosphorothioate
  modified_base 12: mod_base = OTHER; note = 2'-deoxyadenosine 3'-phosphorothioate
  modified_base 13: mod_base = OTHER; note = 2'-deoxyguanosine 3'-phosphorothioate
  modified_base 14: mod_base = OTHER; note = cEt adenosine 3'-phosphorothioate
  modified_base 15: mod_base = OTHER; note = cEt 5-methylcytidine 3'-phosphorothioate
  modified_base 16: mod_base = OTHER; note = cEt thymidine
tctaattctctagact

SEQ ID NO: 1182 - DNA, 16 bp, synthetic construct
  source 1..16: mol_type = other DNA
  modified_base 1: mod_base = OTHER; note = cEt thymidine 3'-phosphorothioate
  modified_base 3: mod_base = OTHER; note = cEt thymidine 3'-phosphorothioate
  modified_base 2: mod_base = OTHER; note = cEt 5-methylcytidine 3'-phosphorothioate
  modified_base 4: mod_base = OTHER; note = 5-methyl-2'-deoxycytidine 3'-phosphorothioate
  modified_base 5: mod_base = OTHER; note = 2'-deoxythymidine 3'-phosphorothioate
  modified_base 6..7: mod_base = OTHER; note = 2'-deoxyadenosine 3'-phosphorothioate
  modified_base 8..9: mod_base = OTHER; note = 2'-deoxythymidine 3'-phosphorothioate
  modified_base 10: mod_base = OTHER; note = 5-methyl-2'-deoxycytidine 3'-phosphorothioate
  modified_base 11: mod_base = OTHER; note = 2'-deoxythymidine 3'-phosphorothioate
  modified_base 12: mod_base = OTHER; note = 5-methyl-2'-deoxycytidine 3'-phosphorothioate
  modified_base 13: mod_base = OTHER; note = 2'-deoxythymidine 3'-phosphorothioate
  modified_base 14: mod_base = OTHER; note = cEt adenosine 3'-phosphorothioate
  modified_base 15: mod_base = OTHER; note = cEt guanosine 3'-phosphorothioate
  modified_base 16: mod_base = OTHER; note = cEt adenosine
tctctaattctctaga

SEQ ID NO: 1183 - DNA, 16 bp, synthetic construct
  source 1..16: mol_type = other DNA
  modified_base 1: mod_base = OTHER; note = cEt 5-methylcytidine 3'-phosphorothioate
  modified_base 3: mod_base = OTHER; note = cEt 5-methylcytidine 3'-phosphorothioate
  modified_base 2: mod_base = OTHER; note = cEt thymidine 3'-phosphorothioate
  modified_base 4: mod_base = OTHER; note = 5-methyl-2'-deoxycytidine 3'-phosphorothioate
  modified_base 5: mod_base = OTHER; note = 2'-deoxyadenosine 3'-phosphorothioate
  modified_base 6: mod_base = OTHER; note = 2'-deoxythymidine 3'-phosphorothioate
  modified_base 7..8: mod_base = OTHER; note = 2'-deoxyadenosine 3'-phosphorothioate
  modified_base 9..10: mod_base = OTHER; note = 2'-deoxythymidine 3'-phosphorothioate
  modified_base 11: mod_base = OTHER; note = 5-methyl-2'-deoxycytidine 3'-phosphorothioate
  modified_base 12: mod_base = OTHER; note = 2'-deoxythymidine 3'-phosphorothioate
  modified_base 13: mod_base = OTHER; note = 5-methyl-2'-deoxycytidine 3'-phosphorothioate
  modified_base 14: mod_base = OTHER; note = cEt thymidine 3'-phosphorothioate
  modified_base 15: mod_base = OTHER; note = cEt adenosine 3'-phosphorothioate
  modified_base 16: mod_base = OTHER; note = cEt adenosine
ctccataattctctaa

SEQ ID NO: 1184 - DNA, 16 bp, synthetic construct
  source 1..16: mol_type = other DNA
  modified_base 1: mod_base = OTHER; note = cEt adenosine 3'-phosphorothioate
  modified_base 2: mod_base = OTHER; note = cEt 5-methylcytidine 3'-phosphorothioate
  modified_base 3: mod_base = OTHER; note = cEt thymidine 3'-phosphorothioate
  modified_base 4: mod_base = OTHER; note = 5-methyl-2'-deoxycytidine 3'-phosphorothioate
  modified_base 5: mod_base = OTHER; note = 2'-deoxythymidine 3'-phosphorothioate
  modified_base 6..7: mod_base = OTHER; note = 5-methyl-2'-deoxycytidine 3'-phosphorothioate
  modified_base 8: mod_base = OTHER; note = 2'-deoxyadenosine 3'-phosphorothioate
  modified_base 9: mod_base = OTHER; note = 2'-deoxythymidine 3'-phosphorothioate
  modified_base 10..11: mod_base = OTHER; note = 2'-deoxyadenosine 3'-phosphorothioate
  modified_base 12..13: mod_base = OTHER; note = 2'-deoxythymidine 3'-phosphorothioate
  modified_base 14: mod_base = OTHER; note = cEt 5-methylcytidine 3'-phosphorothioate
  modified_base 15: mod_base = OTHER; note = cEt thymidine 3'-phosphorothioate
  modified_base 16: mod_base = OTHER; note = cEt 5-methylcytidine
actctccataattctc

SEQ ID NO: 1185 - DNA, 16 bp, synthetic construct
  source 1..16: mol_type = other DNA
  modified_base 1: mod_base = OTHER; note = cEt adenosine 3'-phosphorothioate
  modified_base 3: mod_base = OTHER; note = cEt adenosine 3'-phosphorothioate
  modified_base 2: mod_base = OTHER; note = cEt 5-methylcytidine 3'-phosphorothioate
  modified_base 4: mod_base = OTHER; note = 5-methyl-2'-deoxycytidine 3'-phosphorothioate
  modified_base 6: mod_base = OTHER; note = 5-methyl-2'-deoxycytidine 3'-phosphorothioate
  modified_base 5: mod_base = OTHER; note = 2'-deoxythymidine 3'-phosphorothioate
  modified_base 7: mod_base = OTHER; note = 2'-deoxythymidine 3'-phosphorothioate
  modified_base 8..9: mod_base = OTHER; note = 5-methyl-2'-deoxycytidine 3'-phosphorothioate
  modified_base 10: mod_base = OTHER; note = 2'-deoxyadenosine 3'-phosphorothioate
  modified_base 11: mod_base = OTHER; note = 2'-deoxythymidine 3'-phosphorothioate
  modified_base 12..13: mod_base = OTHER; note = 2'-deoxyadenosine 3'-phosphorothioate
  modified_base 14..15: mod_base = OTHER; note = cEt thymidine 3'-phosphorothioate
  modified_base 16: mod_base = OTHER; note = cEt 5-methylcytidine
acactctccataattc

SEQ ID NO: 1186 - DNA, 16 bp, synthetic construct
  source 1..16: mol_type = other DNA
  modified_base 1..2: mod_base = OTHER; note = cEt 5-methylcytidine 3'-phosphorothioate
  modified_base 3: mod_base = OTHER; note = cEt adenosine 3'-phosphorothioate
  modified_base 4: mod_base = OTHER; note = 5-methyl-2'-deoxycytidine 3'-phosphorothioate
  modified_base 5: mod_base = OTHER; note = 2'-deoxyadenosine 3'-phosphorothioate
  modified_base 6: mod_base = OTHER; note = 5-methyl-2'-deoxycytidine 3'-phosphorothioate
  modified_base 7: mod_base = OTHER; note = 2'-deoxythymidine 3'-phosphorothioate
  modified_base 8: mod_base = OTHER; note = 5-methyl-2'-deoxycytidine 3'-phosphorothioate
  modified_base 9: mod_base = OTHER; note = 2'-deoxythymidine 3'-phosphorothioate
  modified_base 10..11: mod_base = OTHER; note = 5-methyl-2'-deoxycytidine 3'-phosphorothioate
  modified_base 12: mod_base = OTHER; note = 2'-deoxyadenosine 3'-phosphorothioate
  modified_base 13: mod_base = OTHER; note = 2'-deoxythymidine 3'-phosphorothioate
  modified_base 14..15: mod_base = OTHER; note = cEt adenosine 3'-phosphorothioate
  modified_base 16: mod_base = OTHER; note = cEt thymidine
ccacactctccataat

SEQ ID NO: 1187 - DNA, 16 bp, synthetic construct
  source 1..16: mol_type = other DNA
  modified_base 1: mod_base = OTHER; note = cEt thymidine 3'-phosphorothioate
  modified_base 2: mod_base = OTHER; note = cEt guanosine 3'-phosphorothioate
  modified_base 3: mod_base = OTHER; note = cEt 5-methylcytidine 3'-phosphorothioate
  modified_base 4: mod_base = OTHER; note = 5-methyl-2'-deoxycytidine 3'-phosphorothioate
  modified_base 5: mod_base = OTHER; note = 2'-deoxyadenosine 3'-phosphorothioate
  modified_base 6: mod_base = OTHER; note = 5-methyl-2'-deoxycytidine 3'-phosphorothioate
  modified_base 7: mod_base = OTHER; note = 2'-deoxyadenosine 3'-phosphorothioate
  modified_base 8: mod_base = OTHER; note = 5-methyl-2'-deoxycytidine 3'-phosphorothioate
  modified_base 9: mod_base = OTHER; note = 2'-deoxythymidine 3'-phosphorothioate
  modified_base 10: mod_base = OTHER; note = 5-methyl-2'-deoxycytidine 3'-phosphorothioate
  modified_base 11: mod_base = OTHER; note = 2'-deoxythymidine 3'-phosphorothioate
  modified_base 12..13: mod_base = OTHER; note = 5-methyl-2'-deoxycytidine 3'-phosphorothioate
  modified_base 14: mod_base = OTHER; note = cEt adenosine 3'-phosphorothioate
  modified_base 15: mod_base = OTHER; note = cEt thymidine 3'-phosphorothioate
  modified_base 16: mod_base = OTHER; note = cEt adenosine
tgccacactctccata

SEQ ID NO: 1188 - DNA, 16 bp, synthetic construct
  source 1..16: mol_type = other DNA
  modified_base 1..3: mod_base = OTHER; note = cEt 5-methylcytidine 3'-phosphorothioate
  modified_base 4: mod_base = OTHER; note = 2'-deoxyadenosine 3'-phosphorothioate
  modified_base 5: mod_base = OTHER; note = 2'-deoxythymidine 3'-phosphorothioate
  modified_base 6: mod_base = OTHER; note = 2'-deoxyguanosine 3'-phosphorothioate
  modified_base 7..9: mod_base = OTHER; note = 5-methyl-2'-deoxycytidine 3'-phosphorothioate
  modified_base 10: mod_base = OTHER; note = 2'-deoxyadenosine 3'-phosphorothioate
  modified_base 11: mod_base = OTHER; note = 2'-deoxythymidine 3'-phosphorothioate
  modified_base 12..13: mod_base = OTHER; note = 5-methyl-2'-deoxycytidine 3'-phosphorothioate
  modified_base 14: mod_base = OTHER; note = cEt thymidine 3'-phosphorothioate
  modified_base 15: mod_base = OTHER; note = cEt guanosine 3'-phosphorothioate
  modified_base 16: mod_base = OTHER; note = cEt 5-methylcytidine
cccatgcccatcctgc

SEQ ID NO: 1189 - DNA, 16 bp, synthetic construct
  source 1..16: mol_type = other DNA
  modified_base 1..2: mod_base = OTHER; note = cEt guanosine 3'-phosphorothioate
  modified_base 3: mod_base = OTHER; note = cEt adenosine 3'-phosphorothioate
  modified_base 4: mod_base = OTHER; note = 5-methyl-2'-deoxycytidine 3'-phosphorothioate
  modified_base 5: mod_base = OTHER; note = 2'-deoxyadenosine 3'-phosphorothioate
  modified_base 6: mod_base = OTHER; note = 2'-deoxyguanosine 3'-phosphorothioate
  modified_base 7: mod_base = OTHER; note = 2'-deoxyadenosine 3'-phosphorothioate
  modified_base 8: mod_base = OTHER; note = 2'-deoxyguanosine 3'-phosphorothioate
  modified_base 9..11: mod_base = OTHER; note = 2'-deoxyadenosine 3'-phosphorothioate
  modified_base 12: mod_base = OTHER; note = 2'-deoxythymidine 3'-phosphorothioate
  modified_base 13: mod_base = OTHER; note = 2'-deoxyguanosine 3'-phosphorothioate
  modified_base 14..15: mod_base = OTHER; note = cEt thymidine 3'-phosphorothioate
  modified_base 16: mod_base = OTHER; note = cEt guanosine
ggacagagaaatgttg

SEQ ID NO: 1190 - DNA, 16 bp, synthetic construct
  source 1..16: mol_type = other DNA
  modified_base 1..2: mod_base = OTHER; note = cEt guanosine 3'-phosphorothioate
  modified_base 3: mod_base = OTHER; note = cEt 5-methylcytidine 3'-phosphorothioate
  modified_base 4: mod_base = OTHER; note = 2'-deoxyadenosine 3'-phosphorothioate
  modified_base 5: mod_base = OTHER; note = 2'-deoxythymidine 3'-phosphorothioate
  modified_base 6: mod_base = OTHER; note = 2'-deoxyadenosine 3'-phosphorothioate
  modified_base 7..8: mod_base = OTHER; note = 2'-deoxyguanosine 3'-phosphorothioate
  modified_base 9: mod_base = OTHER; note = 2'-deoxyadenosine 3'-phosphorothioate
  modified_base 10: mod_base = OTHER; note = 5-methyl-2'-deoxycytidine 3'-phosphorothioate
  modified_base 11: mod_base = OTHER; note = 2'-deoxyadenosine 3'-phosphorothioate
  modified_base 12: mod_base = OTHER; note = 2'-deoxyguanosine 3'-phosphorothioate
  modified_base 13: mod_base = OTHER; note = 2'-deoxyadenosine 3'-phosphorothioate
  modified_base 14: mod_base = OTHER; note = cEt guanosine 3'-phosphorothioate
  modified_base 15: mod_base = OTHER; note = cEt adenosine 3'-phosphorothioate
  modified_base 16: mod_base = OTHER; note = cEt adenosine
ggcataggacagagaa

SEQ ID NO: 1191 - DNA, 16 bp, synthetic construct
  source 1..16: mol_type = other DNA
  modified_base 1: mod_base = OTHER; note = cEt guanosine 3'-phosphorothioate
  modified_base 3: mod_base = OTHER; note = cEt guanosine 3'-phosphorothioate
  modified_base 2: mod_base = OTHER; note = cEt thymidine 3'-phosphorothioate
  modified_base 4: mod_base = OTHER; note = 2'-deoxyguanosine 3'-phosphorothioate
  modified_base 5: mod_base = OTHER; note = 5-methyl-2'-deoxycytidine 3'-phosphorothioate
  modified_base 6: mod_base = OTHER; note = 2'-deoxyadenosine 3'-phosphorothioate
  modified_base 7: mod_base = OTHER; note = 2'-deoxythymidine 3'-phosphorothioate
  modified_base 8: mod_base = OTHER; note = 2'-deoxyadenosine 3'-phosphorothioate
  modified_base 9..10: mod_base = OTHER; note = 2'-deoxyguanosine 3'-phosphorothioate
  modified_base 11: mod_base = OTHER; note = 2'-deoxyadenosine 3'-phosphorothioate
  modified_base 12: mod_base = OTHER; note = 5-methyl-2'-deoxycytidine 3'-phosphorothioate
  modified_base 13: mod_base = OTHER; note = 2'-deoxyadenosine 3'-phosphorothioate
  modified_base 14: mod_base = OTHER; note = cEt guanosine 3'-phosphorothioate
  modified_base 15: mod_base = OTHER; note = cEt adenosine 3'-phosphorothioate
  modified_base 16: mod_base = OTHER; note = cEt guanosine
gtggcataggacagag

SEQ ID NO: 1192 - DNA, 16 bp, synthetic construct
  source 1..16: mol_type = other DNA
  modified_base 1: mod_base = OTHER; note = cEt thymidine 3'-phosphorothioate
  modified_base 2..3: mod_base = OTHER; note = cEt guanosine 3'-phosphorothioate
  modified_base 4: mod_base = OTHER; note = 2'-deoxythymidine 3'-phosphorothioate
  modified_base 5..6: mod_base = OTHER; note = 2'-deoxyguanosine 3'-phosphorothioate
  modified_base 7: mod_base = OTHER; note = 5-methyl-2'-deoxycytidine 3'-phosphorothioate
  modified_base 8: mod_base = OTHER; note = 2'-deoxyadenosine 3'-phosphorothioate
  modified_base 9: mod_base = OTHER; note = 2'-deoxythymidine 3'-phosphorothioate
  modified_base 10: mod_base = OTHER; note = 2'-deoxyadenosine 3'-phosphorothioate
  modified_base 11..12: mod_base = OTHER; note = 2'-deoxyguanosine 3'-phosphorothioate
  modified_base 13: mod_base = OTHER; note = 2'-deoxyadenosine 3'-phosphorothioate
  modified_base 14: mod_base = OTHER; note = cEt 5-methylcytidine 3'-phosphorothioate
  modified_base 15: mod_base = OTHER; note = cEt adenosine 3'-phosphorothioate
  modified_base 16: mod_base = OTHER; note = cEt guanosine
tggtggcataggacag

SEQ ID NO: 1193 - DNA, 16 bp, synthetic construct
  source 1..16: mol_type = other DNA
  modified_base 1: mod_base = OTHER; note = cEt 5-methylcytidine 3'-phosphorothioate
  modified_base 2..3: mod_base = OTHER; note = cEt thymidine 3'-phosphorothioate
  modified_base 4: mod_base = OTHER; note = 2'-deoxyadenosine 3'-phosphorothioate
  modified_base 5: mod_base = OTHER; note = 5-methyl-2'-deoxycytidine 3'-phosphorothioate
  modified_base 6: mod_base = OTHER; note = 2'-deoxythymidine 3'-phosphorothioate
  modified_base 7: mod_base = OTHER; note = 5-methyl-2'-deoxycytidine 3'-phosphorothioate
  modified_base 8: mod_base = OTHER; note = 2'-deoxythymidine 3'-phosphorothioate
  modified_base 9: mod_base = OTHER; note = 2'-deoxyguanosine 3'-phosphorothioate
  modified_base 10..13: mod_base = OTHER; note = 5-methyl-2'-deoxycytidine 3'-phosphorothioate
  modified_base 14: mod_base = OTHER; note = cEt thymidine 3'-phosphorothioate
  modified_base 15: mod_base = OTHER; note = cEt 5-methylcytidine 3'-phosphorothioate
  modified_base 16: mod_base = OTHER; note = cEt 5-methylcytidine
cttactctgcccctcc

SEQ ID NO: 1194 - DNA, 16 bp, synthetic construct
  source 1..16: mol_type = other DNA
  modified_base 1: mod_base = OTHER; note = cEt adenosine 3'-phosphorothioate
  modified_base 2..3: mod_base = OTHER; note = cEt 5-methylcytidine 3'-phosphorothioate
  modified_base 4..5: mod_base = OTHER; note = 2'-deoxythymidine 3'-phosphorothioate
  modified_base 6: mod_base = OTHER; note = 2'-deoxyadenosine 3'-phosphorothioate
  modified_base 7: mod_base = OTHER; note = 5-methyl-2'-deoxycytidine 3'-phosphorothioate
  modified_base 8: mod_base = OTHER; note = 2'-deoxythymidine 3'-phosphorothioate
  modified_base 9: mod_base = OTHER; note = 5-methyl-2'-deoxycytidine 3'-phosphorothioate
  modified_base 10: mod_base = OTHER; note = 2'-deoxythymidine 3'-phosphorothioate
  modified_base 11: mod_base = OTHER; note = 2'-deoxyguanosine 3'-phosphorothioate
  modified_base 12..13: mod_base = OTHER; note = 5-methyl-2'-deoxycytidine 3'-phosphorothioate
  modified_base 14..15: mod_base = OTHER; note = cEt 5-methylcytidine 3'-phosphorothioate
  modified_base 16: mod_base = OTHER; note = cEt thymidine
accttactctgcccct

SEQ ID NO: 1195 - DNA, 16 bp, synthetic construct
  source 1..16: mol_type = other DNA
  modified_base 1: mod_base = OTHER; note = cEt thymidine 3'-phosphorothioate
  modified_base 2: mod_base = OTHER; note = cEt guanosine 3'-phosphorothioate
  modified_base 3: mod_base = OTHER; note = cEt adenosine 3'-phosphorothioate
  modified_base 4..5: mod_base = OTHER; note = 5-methyl-2'-deoxycytidine 3'-phosphorothioate
tgaccttactctgccc

SEQ ID NO: 1196 - DNA, 16 bp, synthetic construct
  source 1..16: mol_type = other DNA
  modified_base 1: mod_base = OTHER; note = cEt guanosine 3'-phosphorothioate
  modified_base 2: mod_base = OTHER; note = cEt 5-methylcytidine 3'-phosphorothioate
  modified_base 3: mod_base = OTHER; note = cEt thymidine 3'-phosphorothioate
  modified_base 4: mod_base = OTHER; note = 2'-deoxyguanosine 3'-phosphorothioate
  modified_base 5: mod_base = OTHER; note = 2'-deoxyadenosine 3'-phosphorothioate
  modified_base 6..7: mod_base = OTHER; note = 5-methyl-2'-deoxycytidine 3'-phosphorothioate
  modified_base 8..9: mod_base = OTHER; note = 2'-deoxythymidine 3'-phosphorothioate
  modified_base 10: mod_base = OTHER; note = 2'-deoxyadenosine 3'-phosphorothioate
  modified_base 11: mod_base = OTHER; note = 5-methyl-2'-deoxycytidine 3'-phosphorothioate
  modified_base 12: mod_base = OTHER; note = 2'-deoxythymidine 3'-phosphorothioate
  modified_base 13: mod_base = OTHER; note = 5-methyl-2'-deoxycytidine 3'-phosphorothioate
  modified_base 14: mod_base = OTHER; note = cEt thymidine 3'-phosphorothioate
  modified_base 15: mod_base = OTHER; note = cEt guanosine 3'-phosphorothioate
  modified_base 16: mod_base = OTHER; note = cEt 5-methylcytidine
gctgaccttactctgc

SEQ ID NO: 1197 - DNA, 16 bp, synthetic construct
  source 1..16: mol_type = other DNA
  modified_base 1: mod_base = OTHER; note = cEt 5-methylcytidine 3'-phosphorothioate
  modified_base 2: mod_base = OTHER; note = cEt thymidine 3'-phosphorothioate
  modified_base 3: mod_base = OTHER; note = cEt guanosine 3'-phosphorothioate
  modified_base 4: mod_base = OTHER; note = 5-methyl-2'-deoxycytidine 3'-phosphorothioate
  modified_base 5: mod_base = OTHER; note = 2'-deoxythymidine 3'-phosphorothioate
  modified_base 6: mod_base = OTHER; note = 2'-deoxyguanosine 3'-phosphorothioate
  modified_base 7: mod_base = OTHER; note = 2'-deoxyadenosine 3'-phosphorothioate
  modified_base 8..9: mod_base = OTHER; note = 5-methyl-2'-deoxycytidine 3'-phosphorothioate
  modified_base 10..11: mod_base = OTHER; note = 2'-deoxythymidine 3'-phosphorothioate
  modified_base 12: mod_base = OTHER; note = 2'-deoxyadenosine 3'-phosphorothioate
  modified_base 13: mod_base = OTHER; note = 5-methyl-2'-deoxycytidine 3'-phosphorothioate
  modified_base 14: mod_base = OTHER; note = cEt thymidine 3'-phosphorothioate
  modified_base 15: mod_base = OTHER; note = cEt 5-methylcytidine 3'-phosphorothioate
  modified_base 16: mod_base = OTHER; note = cEt thymidine
ctgctgaccttactct

SEQ ID NO: 1198 - DNA, 16 bp, synthetic construct
  source 1..16: mol_type = other DNA
  modified_base 1: mod_base = OTHER; note = cEt 5-methylcytidine 3'-phosphorothioate
  modified_base 3: mod_base = OTHER; note = cEt 5-methylcytidine 3'-phosphorothioate
  modified_base 2: mod_base = OTHER; note = cEt thymidine 3'-phosphorothioate
  modified_base 4: mod_base = OTHER; note = 2'-deoxythymidine 3'-phosphorothioate
  modified_base 5: mod_base = OTHER; note = 2'-deoxyguanosine 3'-phosphorothioate
  modified_base 6: mod_base = OTHER; note = 5-methyl-2'-deoxycytidine 3'-phosphorothioate
  modified_base 7: mod_base = OTHER; note = 2'-deoxythymidine 3'-phosphorothioate
  modified_base 8: mod_base = OTHER; note = 2'-deoxyguanosine 3'-phosphorothioate
  modified_base 9: mod_base = OTHER; note = 2'-deoxyadenosine 3'-phosphorothioate
  modified_base 10..11: mod_base = OTHER; note = 5-methyl-2'-deoxycytidine 3'-phosphorothioate
  modified_base 12..13: mod_base = OTHER; note = 2'-deoxythymidine 3'-phosphorothioate
  modified_base 14: mod_base = OTHER; note = cEt adenosine 3'-phosphorothioate
  modified_base 15: mod_base = OTHER; note = cEt 5-methylcytidine 3'-phosphorothioate
  modified_base 16: mod_base = OTHER; note = cEt thymidine
ctctgctgaccttact

SEQ ID NO: 1199 - DNA, 16 bp, synthetic construct
  source 1..16: mol_type = other DNA
  modified_base 1: mod_base = OTHER; note = cEt guanosine 3'-phosphorothioate
  modified_base 2..3: mod_base = OTHER; note = cEt 5-methylcytidine 3'-phosphorothioate
  modified_base 4: mod_base = OTHER; note = 2'-deoxythymidine 3'-phosphorothioate
  modified_base 5: mod_base = OTHER; note = 5-methyl-2'-deoxycytidine 3'-phosphorothioate
  modified_base 6: mod_base = OTHER; note = 2'-deoxythymidine 3'-phosphorothioate
  modified_base 7: mod_base = OTHER; note = 2'-deoxyguanosine 3'-phosphorothioate
  modified_base 8: mod_base = OTHER; note = 5-methyl-2'-deoxycytidine 3'-phosphorothioate
  modified_base 9: mod_base = OTHER; note = 2'-deoxythymidine 3'-phosphorothioate
  modified_base 10: mod_base = OTHER; note = 2'-deoxyguanosine 3'-phosphorothioate
  modified_base 11: mod_base = OTHER; note = 2'-deoxyadenosine 3'-phosphorothioate
  modified_base 12..13: mod_base = OTHER; note = 5-methyl-2'-deoxycytidine 3'-phosphorothioate
  modified_base 14..15: mod_base = OTHER; note = cEt thymidine 3'-phosphorothioate
  modified_base 16: mod_base = OTHER; note = cEt adenosine
gcctctgctgacctta

SEQ ID NO: 1200 - DNA, 16 bp, synthetic construct
  source 1..16: mol_type = other DNA
  modified_base 1..2: mod_base = OTHER; note = cEt 5-methylcytidine 3'-phosphorothioate
  modified_base 3: mod_base = OTHER; note = cEt adenosine 3'-phosphorothioate
  modified_base 4: mod_base = OTHER; note = 2'-deoxythymidine 3'-phosphorothioate
  modified_base 5..6: mod_base = OTHER; note = 2'-deoxyguanosine 3'-phosphorothioate
  modified_base 7: mod_base = OTHER; note = 5-methyl-2'-deoxycytidine 3'-phosphorothioate
  modified_base 8: mod_base = OTHER; note = 2'-deoxythymidine 3'-phosphorothioate
  modified_base 9: mod_base = OTHER; note = 5-methyl-2'-deoxycytidine 3'-phosphorothioate
  modified_base 10: mod_base = OTHER; note = 2'-deoxythymidine 3'-phosphorothioate
  modified_base 11: mod_base = OTHER; note = 2'-deoxyguanosine 3'-phosphorothioate
  modified_base 12: mod_base = OTHER; note = 2'-deoxyadenosine 3'-phosphorothioate
  modified_base 13: mod_base = OTHER; note = 2'-deoxyguanosine 3'-phosphorothioate
  modified_base 14: mod_base = OTHER; note = cEt thymidine 3'-phosphorothioate
  modified_base 15: mod_base = OTHER; note = cEt 5-methylcytidine 3'-phosphorothioate
  modified_base 16: mod_base = OTHER; note = cEt adenosine
ccatggctctgagtca

SEQ ID NO: 1201 - DNA, 16 bp, synthetic construct
  source 1..16: mol_type = other DNA
  modified_base 1: mod_base = OTHER; note = cEt adenosine 3'-phosphorothioate
  modified_base 2: mod_base = OTHER; note = cEt guanosine 3'-phosphorothioate
  modified_base 3: mod_base = OTHER; note = cEt 5-methylcytidine 3'-phosphorothioate
  modified_base 4: mod_base = OTHER; note = 5-methyl-2'-deoxycytidine 3'-phosphorothioate
  modified_base 5: mod_base = OTHER; note = 2'-deoxyadenosine 3'-phosphorothioate
  modified_base 6: mod_base = OTHER; note = 2'-deoxythymidine 3'-phosphorothioate
  modified_base 7..8: mod_base = OTHER; note = 2'-deoxyguanosine 3'-phosphorothioate
  modified_base 9: mod_base = OTHER; note = 5-methyl-2'-deoxycytidine 3'-phosphorothioate
  modified_base 10: mod_base = OTHER; note = 2'-deoxythymidine 3'-phosphorothioate
  modified_base 11: mod_base = OTHER; note = 5-methyl-2'-deoxycytidine 3'-phosphorothioate
  modified_base 12: mod_base = OTHER; note = 2'-deoxythymidine 3'-phosphorothioate
  modified_base 13: mod_base = OTHER; note = 2'-deoxyguanosine 3'-phosphorothioate
  modified_base 14: mod_base = OTHER; note = cEt adenosine 3'-phosphorothioate
  modified_base 15: mod_base = OTHER; note = cEt guanosine 3'-phosphorothioate
  modified_base 16: mod_base = OTHER; note = cEt thymidine
agccatggctctgagt

SEQ ID NO: 1202 - DNA, 16 bp, synthetic construct
  source 1..16: mol_type = other DNA
  modified_base 1: mod_base = OTHER; note = cEt thymidine 3'-phosphorothioate
  modified_base 2..3: mod_base = OTHER; note = cEt adenosine 3'-phosphorothioate
  modified_base 4: mod_base = OTHER; note = 2'-deoxyguanosine 3'-phosphorothioate
  modified_base 5..6: mod_base = OTHER; note = 5-methyl-2'-deoxycytidine 3'-phosphorothioate
  modified_base 7: mod_base = OTHER; note = 2'-deoxyadenosine 3'-phosphorothioate
  modified_base 8: mod_base = OTHER; note = 2'-deoxythymidine 3'-phosphorothioate
  modified_base 9..10: mod_base = OTHER; note = 2'-deoxyguanosine 3'-phosphorothioate
  modified_base 11: mod_base = OTHER; note = 5-methyl-2'-deoxycytidine 3'-phosphorothioate
  modified_base 12: mod_base = OTHER; note = 2'-deoxythymidine 3'-phosphorothioate
  modified_base 13: mod_base = OTHER; note = 5-methyl-2'-deoxycytidine 3'-phosphorothioate
  modified_base 14: mod_base = OTHER; note = cEt thymidine 3'-phosphorothioate
  modified_base 15: mod_base = OTHER; note = cEt guanosine 3'-phosphorothioate
  modified_base 16: mod_base = OTHER; note = cEt adenosine
taagccatggctctga

SEQ ID NO: 1203 - DNA, 16 bp, synthetic construct
  source 1..16: mol_type = other DNA
  modified_base 1: mod_base = OTHER; note = cEt thymidine 3'-phosphorothioate
  modified_base 2: mod_base = OTHER; note = cEt adenosine 3'-phosphorothioate
  modified_base 3: mod_base = OTHER; note = cEt guanosine 3'-phosphorothioate
  modified_base 4..5: mod_base = OTHER; note = 5-methyl-2'-deoxycytidine 3'-phosphorothioate
  modified_base 6: mod_base = OTHER; note = 2'-deoxythymidine 3'-phosphorothioate
  modified_base 7: mod_base = OTHER; note = 2'-deoxyguanosine 3'-phosphorothioate
  modified_base 8: mod_base = OTHER; note = 5-methyl-2'-deoxycytidine 3'-phosphorothioate
  modified_base 9: mod_base = OTHER; note = 2'-deoxythymidine 3'-phosphorothioate
  modified_base 10: mod_base = OTHER; note = 2'-deoxyguanosine 3'-phosphorothioate
  modified_base 11: mod_base = OTHER; note = 2'-deoxythymidine 3'-phosphorothioate
  modified_base 12: mod_base = OTHER; note = 2'-deoxyguanosine 3'-phosphorothioate
  modified_base 13: mod_base = OTHER; note = 2'-deoxyadenosine 3'-phosphorothioate
  modified_base 14: mod_base = OTHER; note = cEt 5-methylcytidine 3'-phosphorothioate
  modified_base 15: mod_base = OTHER; note = cEt thymidine 3'-phosphorothioate
  modified_base 16: mod_base = OTHER; note = cEt 5-methylcytidine
tagcctgctgtgactc

SEQ ID NO: 1204 - DNA, 16 bp, synthetic construct
  source 1..16: mol_type = other DNA
  modified_base 1: mod_base = OTHER; note = cEt adenosine 3'-phosphorothioate
  modified_base 2: mod_base = OTHER; note = cEt thymidine 3'-phosphorothioate
  modified_base 3: mod_base = OTHER; note = cEt guanosine 3'-phosphorothioate
  modified_base 4..5: mod_base = OTHER; note = 2'-deoxyguanosine 3'-phosphorothioate
  modified_base 6: mod_base = OTHER; note = 2'-deoxyadenosine 3'-phosphorothioate
  modified_base 7..8: mod_base = OTHER; note = 2'-deoxyguanosine 3'-phosphorothioate
  modified_base 9: mod_base = OTHER; note = 5-methyl-2'-deoxycytidine 3'-phosphorothioate
  modified_base 10: mod_base = OTHER; note = 2'-deoxythymidine 3'-phosphorothioate
  modified_base 11: mod_base = OTHER; note = 2'-deoxyguanosine 3'-phosphorothioate
  modified_base 12..13: mod_base = OTHER; note = 2'-deoxythymidine 3'-phosphorothioate
  modified_base 14..15: mod_base = OTHER; note = cEt guanosine 3'-phosphorothioate
  modified_base 16: mod_base = OTHER; note = cEt 5-methylcytidine
atgggaggctgttggc

SEQ ID NO: 1205 - DNA, 16 bp, synthetic construct
  source 1..16: mol_type = other DNA
  modified_base 1..2: mod_base = OTHER; note = cEt 5-methylcytidine 3'-phosphorothioate
  modified_base 3: mod_base = OTHER; note = cEt adenosine 3'-phosphorothioate
  modified_base 4: mod_base = OTHER; note = 2'-deoxythymidine 3'-phosphorothioate
  modified_base 5..7: mod_base = OTHER; note = 2'-deoxyguanosine 3'-phosphorothioate
  modified_base 8: mod_base = OTHER; note = 2'-deoxyadenosine 3'-phosphorothioate
  modified_base 9..10: mod_base = OTHER; note = 2'-deoxyguanosine 3'-phosphorothioate
  modified_base 11: mod_base = OTHER; note = 5-methyl-2'-deoxycytidine 3'-phosphorothioate
  modified_base 12: mod_base = OTHER; note = 2'-deoxythymidine 3'-phosphorothioate
  modified_base 13: mod_base = OTHER; note = 2'-deoxyguanosine 3'-phosphorothioate
  modified_base 14..15: mod_base = OTHER; note = cEt thymidine 3'-phosphorothioate
  modified_base 16: mod_base = OTHER; note = cEt guanosine
ccatgggaggctgttg

SEQ ID NO: 1206 - DNA, 16 bp, synthetic construct
  source 1..16: mol_type = other DNA
  modified_base 1..2: mod_base = OTHER; note = cEt guanosine 3'-phosphorothioate
  modified_base 3: mod_base = OTHER; note = cEt 5-methylcytidine 3'-phosphorothioate
  modified_base 4: mod_base = OTHER; note = 5-methyl-2'-deoxycytidine 3'-phosphorothioate
  modified_base 5: mod_base = OTHER; note = 2'-deoxyadenosine 3'-phosphorothioate
  modified_base 6: mod_base = OTHER; note = 2'-deoxythymidine 3'-phosphorothioate
  modified_base 7..9: mod_base = OTHER; note = 2'-deoxyguanosine 3'-phosphorothioate
  modified_base 10: mod_base = OTHER; note = 2'-deoxyadenosine 3'-phosphorothioate
  modified_base 11..12: mod_base = OTHER; note = 2'-deoxyguanosine 3'-phosphorothioate
  modified_base 13: mod_base = OTHER; note = 5-methyl-2'-deoxycytidine 3'-phosphorothioate
  modified_base 14: mod_base = OTHER; note = cEt thymidine 3'-phosphorothioate
  modified_base 15: mod_base = OTHER; note = cEt guanosine 3'-phosphorothioate
  modified_base 16: mod_base = OTHER; note = cEt thymidine
ggccatgggaggctgt

SEQ ID NO: 1207 - DNA, 16 bp, synthetic construct
  source 1..16: mol_type = other DNA
  modified_base 1: mod_base = OTHER; note = cEt guanosine 3'-phosphorothioate
  modified_base 2: mod_base = OTHER; note = cEt thymidine 3'-phosphorothioate
  modified_base 3: mod_base = OTHER; note = cEt guanosine 3'-phosphorothioate
  modified_base 4: mod_base = OTHER; note = 5-methyl-2'-deoxycytidine 3'-phosphorothioate
  modified_base 5: mod_base = OTHER; note = 2'-deoxyadenosine 3'-phosphorothioate
  modified_base 6: mod_base = OTHER; note = 2'-deoxyguanosine 3'-phosphorothioate
  modified_base 7: mod_base = OTHER; note = 2'-deoxyadenosine 3'-phosphorothioate
  modified_base 8: mod_base = OTHER; note = 2'-deoxyguanosine 3'-phosphorothioate
  modified_base 9: mod_base = OTHER; note = 2'-deoxyadenosine 3'-phosphorothioate
  modified_base 10..11: mod_base = OTHER; note = 2'-deoxyguanosine 3'-phosphorothioate
  modified_base 12..13: mod_base = OTHER; note = 5-methyl-2'-deoxycytidine 3'-phosphorothioate
  modified_base 14: mod_base = OTHER; note = cEt adenosine 3'-phosphorothioate
  modified_base 15: mod_base = OTHER; note = cEt thymidine 3'-phosphorothioate
  modified_base 16: mod_base = OTHER; note = cEt guanosine
gtgcagagaggccatg

SEQ ID NO: 1208 - DNA, 16 bp, synthetic construct
  source 1..16: mol_type = other DNA
  modified_base 1: mod_base = OTHER; note = cEt guanosine 3'-phosphorothioate
  modified_base 2: mod_base = OTHER; note = cEt adenosine 3'-phosphorothioate
  modified_base 3: mod_base = OTHER; note = cEt guanosine 3'-phosphorothioate
  modified_base 4: mod_base = OTHER; note = 5-methyl-2'-deoxycytidine 3'-phosphorothioate
  modified_base 5: mod_base = OTHER; note = 2'-deoxythymidine 3'-phosphorothioate
  modified_base 6..8: mod_base = OTHER; note = 5-methyl-2'-deoxycytidine 3'-phosphorothioate
  modified_base 9: mod_base = OTHER; note = 2'-deoxyadenosine 3'-phosphorothioate
  modified_base 10: mod_base = OTHER; note = 2'-deoxyguanosine 3'-phosphorothioate
  modified_base 11: mod_base = OTHER; note = 5-methyl-2'-deoxycytidine 3'-phosphorothioate
  modified_base 12: mod_base = OTHER; note = 2'-deoxyadenosine 3'-phosphorothioate
  modified_base 13: mod_base = OTHER; note = 2'-deoxythymidine 3'-phosphorothioate
  modified_base 14: mod_base = OTHER; note = cEt guanosine 3'-phosphorothioate
  modified_base 15: mod_base = OTHER; note = cEt adenosine 3'-phosphorothioate
  modified_base 16: mod_base = OTHER; note = cEt 5-methylcytidine
gagctcccagcatgac

SEQ ID NO: 1209 - DNA, 16 bp, synthetic construct
  source 1..16: mol_type = other DNA
  modified_base 1: mod_base = OTHER; note = cEt adenosine 3'-phosphorothioate
  modified_base 2..3: mod_base = OTHER; note = cEt guanosine 3'-phosphorothioate
  modified_base 4: mod_base = OTHER; note = 2'-deoxyguanosine 3'-phosphorothioate
  modified_base 5: mod_base = OTHER; note = 2'-deoxyadenosine 3'-phosphorothioate
  modified_base 6: mod_base = OTHER; note = 2'-deoxyguanosine 3'-phosphorothioate
  modified_base 7: mod_base = OTHER; note = 5-methyl-2'-deoxycytidine 3'-phosphorothioate
  modified_base 8: mod_base = OTHER; note = 2'-deoxythymidine 3'-phosphorothioate
  modified_base 9..11: mod_base = OTHER; note = 5-methyl-2'-deoxycytidine 3'-phosphorothioate
  modified_base 12: mod_base = OTHER; note = 2'-deoxyadenosine 3'-phosphorothioate
  modified_base 13: mod_base = OTHER; note = 2'-deoxyguanosine 3'-phosphorothioate
  modified_base 14: mod_base = OTHER; note = cEt 5-methylcytidine 3'-phosphorothioate
  modified_base 15: mod_base = OTHER; note = cEt adenosine 3'-phosphorothioate
  modified_base 16: mod_base = OTHER; note = cEt thymidine
agggagctcccagcat

SEQ ID NO: 1210 - DNA, 16 bp, synthetic construct
  source 1..16: mol_type = other DNA
  modified_base 1: mod_base = OTHER; note = cEt guanosine 3'-phosphorothioate
  modified_base 2..3: mod_base = OTHER; note = cEt 5-methylcytidine 3'-phosphorothioate
  modified_base 4: mod_base = OTHER; note = 2'-deoxyadenosine 3'-phosphorothioate
  modified_base 5: mod_base = OTHER; note = 2'-deoxythymidine 3'-phosphorothioate
  modified_base 6: mod_base = OTHER; note = 2'-deoxyadenosine 3'-phosphorothioate
  modified_base 7: mod_base = OTHER; note = 2'-deoxyguanosine 3'-phosphorothioate
  modified_base 8: mod_base = OTHER; note = 2'-deoxyadenosine 3'-phosphorothioate
  modified_base 9: mod_base = OTHER; note = 2'-deoxyguanosine 3'-phosphorothioate
  modified_base 10..12: mod_base = OTHER; note = 5-methyl-2'-deoxycytidine 3'-phosphorothioate
  modified_base 13: mod_base = OTHER; note = 2'-deoxyadenosine 3'-phosphorothioate
  modified_base 14: mod_base = OTHER; note = cEt 5-methylcytidine 3'-phosphorothioate
  modified_base 15: mod_base = OTHER; note = cEt thymidine 3'-phosphorothioate
  modified_base 16: mod_base = OTHER; note = cEt thymidine
gccatagagcccactt

SEQ ID NO: 1211 - DNA, 16 bp, synthetic construct
  source 1..16: mol_type = other DNA
  modified_base 1..3: mod_base = OTHER; note = cEt guanosine 3'-phosphorothioate
  modified_base 4..5: mod_base = OTHER; note = 5-methyl-2'-deoxycytidine 3'-phosphorothioate
  modified_base 6: mod_base = OTHER; note = 2'-deoxyadenosine 3'-phosphorothioate
  modified_base 7: mod_base = OTHER; note = 2'-deoxythymidine 3'-phosphorothioate
  modified_base 8: mod_base = OTHER; note = 2'-deoxyadenosine 3'-phosphorothioate
  modified_base 9: mod_base = OTHER; note = 2'-deoxyguanosine 3'-phosphorothioate
  modified_base 10: mod_base = OTHER; note = 2'-deoxyadenosine 3'-phosphorothioate
  modified_base 11: mod_base = OTHER; note = 2'-deoxyguanosine 3'-phosphorothioate
  modified_base 12..13: mod_base = OTHER; note = 5-methyl-2'-deoxycytidine 3'-phosphorothioate
  modified_base 14: mod_base = OTHER; note = cEt 5-methylcytidine 3'-phosphorothioate
  modified_base 15: mod_base = OTHER; note = cEt adenosine 3'-phosphorothioate
  modified_base 16: mod_base = OTHER; note = cEt 5-methylcytidine
gggccatagagcccac

SEQ ID NO: 1212 - DNA, 16 bp, synthetic construct
  source 1..16: mol_type = other DNA
  modified_base 1: mod_base = OTHER; note = cEt adenosine 3'-phosphorothioate
  modified_base 2: mod_base = OTHER; note = cEt thymidine 3'-phosphorothioate
  modified_base 3: mod_base = OTHER; note = cEt guanosine 3'-phosphorothioate
  modified_base 4: mod_base = OTHER; note = 5-methyl-2'-deoxycytidine 3'-phosphorothioate
  modified_base 5: mod_base = OTHER; note = 2'-deoxythymidine 3'-phosphorothioate
  modified_base 6..7: mod_base = OTHER; note = 2'-deoxyguanosine 3'-phosphorothioate
  modified_base 8..10: mod_base = OTHER; note = 5-methyl-2'-deoxycytidine 3'-phosphorothioate
  modified_base 11: mod_base = OTHER; note = 2'-deoxythymidine 3'-phosphorothioate
  modified_base 12..13: mod_base = OTHER; note = 5-methyl-2'-deoxycytidine 3'-phosphorothioate
  modified_base 14: mod_base = OTHER; note = cEt thymidine 3'-phosphorothioate
  modified_base 15: mod_base = OTHER; note = cEt guanosine 3'-phosphorothioate
  modified_base 16: mod_base = OTHER; note = cEt guanosine
atgctggccctcctgg

SEQ ID NO: 1213 - DNA, 16 bp, synthetic construct
  source 1..16: mol_type = other DNA
  modified_base 1: mod_base = OTHER; note = cEt adenosine 3'-phosphorothioate
  modified_base 2: mod_base = OTHER; note = cEt guanosine 3'-phosphorothioate
  modified_base 3: mod_base = OTHER; note = cEt 5-methylcytidine 3'-phosphorothioate
  modified_base 4: mod_base = OTHER; note = 2'-deoxythymidine 3'-phosphorothioate
  modified_base 5: mod_base = OTHER; note = 2'-deoxyguanosine 3'-phosphorothioate
  modified_base 6..9: mod_base = OTHER; note = 5-methyl-2'-deoxycytidine 3'-phosphorothioate
  modified_base 10: mod_base = OTHER; note = 2'-deoxyadenosine 3'-phosphorothioate
  modified_base 11: mod_base = OTHER; note = 2'-deoxythymidine 3'-phosphorothioate
  modified_base 12: mod_base = OTHER; note = 2'-deoxyguanosine 3'-phosphorothioate
  modified_base 13: mod_base = OTHER; note = 5-methyl-2'-deoxycytidine 3'-phosphorothioate
  modified_base 14: mod_base = OTHER; note = cEt thymidine 3'-phosphorothioate
  modified_base 15: mod_base = OTHER; note = cEt guanosine 3'-phosphorothioate
  modified_base 16: mod_base = OTHER; note = cEt guanosine
agctgccccatgctgg

SEQ ID NO: 1214 - DNA, 16 bp, synthetic construct
  source 1..16: mol_type = other DNA
  modified_base 1: mod_base = OTHER; note = cEt 5-methylcytidine 3'-phosphorothioate
  modified_base 2: mod_base = OTHER; note = cEt guanosine 3'-phosphorothioate
  modified_base 3: mod_base = OTHER; note = cEt 5-methylcytidine 3'-phosphorothioate
  modified_base 4..6: mod_base = OTHER; note = 5-methyl-2'-deoxycytidine 3'-phosphorothioate
  modified_base 7: mod_base = OTHER; note = 2'-deoxythymidine 3'-phosphorothioate
  modified_base 8..9: mod_base = OTHER; note = 2'-deoxyguanosine 3'-phosphorothioate
  modified_base 10: mod_base = OTHER; note = 5-methyl-2'-deoxycytidine 3'-phosphorothioate
  modified_base 11: mod_base = OTHER; note = 2'-deoxyadenosine 3'-phosphorothioate
  modified_base 12: mod_base = OTHER; note = 2'-deoxyguanosine 3'-phosphorothioate
  modified_base 13: mod_base = OTHER; note = 5-methyl-2'-deoxycytidine 3'-phosphorothioate
  modified_base 14: mod_base = OTHER; note = cEt thymidine 3'-phosphorothioate
  modified_base 15: mod_base = OTHER; note = cEt guanosine 3'-phosphorothioate
  modified_base 16: mod_base = OTHER; note = cEt 5-methylcytidine
cgcccctggcagctgc

SEQ ID NO: 1215 - DNA, 16 bp, synthetic construct
  source 1..16: mol_type = other DNA
  modified_base 1: mod_base = OTHER; note = cEt thymidine 3'-phosphorothioate
  modified_base 2: mod_base = OTHER; note = cEt guanosine 3'-phosphorothioate
  modified_base 3: mod_base = OTHER; note = cEt 5-methylcytidine 3'-phosphorothioate
  modified_base 4: mod_base = OTHER; note = 2'-deoxyguanosine 3'-phosphorothioate
  modified_base 5..8: mod_base = OTHER; note = 5-methyl-2'-deoxycytidine 3'-phosphorothioate
  modified_base 9: mod_base = OTHER; note = 2'-deoxythymidine 3'-phosphorothioate
  modified_base 10..11: mod_base = OTHER; note = 2'-deoxyguanosine 3'-phosphorothioate
  modified_base 12: mod_base = OTHER; note = 5-methyl-2'-deoxycytidine 3'-phosphorothioate
  modified_base 13: mod_base = OTHER; note = 2'-deoxyadenosine 3'-phosphorothioate
  modified_base 14: mod_base = OTHER; note = cEt guanosine 3'-phosphorothioate
  modified_base 15: mod_base = OTHER; note = cEt 5-methylcytidine 3'-phosphorothioate
  modified_base 16: mod_base = OTHER; note = cEt thymidine
tgcgcccctggcagct

SEQ ID NO: 1216 - DNA, 16 bp, synthetic construct
  source 1..16: mol_type = other DNA
  modified_base 1: mod_base = OTHER; note = cEt guanosine 3'-phosphorothioate
  modified_base 2: mod_base = OTHER; note = cEt 5-methylcytidine 3'-phosphorothioate
  modified_base 3: mod_base = OTHER; note = cEt thymidine 3'-phosphorothioate
  modified_base 4: mod_base = OTHER; note = 2'-deoxyguanosine 3'-phosphorothioate
  modified_base 5: mod_base = OTHER; note = 5-methyl-2'-deoxycytidine 3'-phosphorothioate
  modified_base 6: mod_base = OTHER; note = 2'-deoxyguanosine 3'-phosphorothioate
  modified_base 7..10: mod_base = OTHER; note = 5-methyl-2'-deoxycytidine 3'-phosphorothioate
  modified_base 11: mod_base = OTHER; note = 2'-deoxythymidine 3'-phosphorothioate
  modified_base 12..13: mod_base = OTHER; note = 2'-deoxyguanosine 3'-phosphorothioate
  modified_base 14: mod_base = OTHER; note = cEt 5-methylcytidine 3'-phosphorothioate
  modified_base 15: mod_base = OTHER; note = cEt adenosine 3'-phosphorothioate
  modified_base 16: mod_base = OTHER; note = cEt guanosine
gctgcgcccctggcag

SEQ ID NO: 1217 - DNA, 16 bp, synthetic construct
  source 1..16: mol_type = other DNA
  modified_base 1: mod_base = OTHER; note = cEt 5-methylcytidine 3'-phosphorothioate
  modified_base 2..3: mod_base = OTHER; note = cEt guanosine 3'-phosphorothioate
  modified_base 4: mod_base = OTHER; note = 5-methyl-2'-deoxycytidine 3'-phosphorothioate
  modified_base 5: mod_base = OTHER; note = 2'-deoxythymidine 3'-phosphorothioate
  modified_base 6: mod_base = OTHER; note = 2'-deoxyguanosine 3'-phosphorothioate
  modified_base 7: mod_base = OTHER; note = 5-methyl-2'-deoxycytidine 3'-phosphorothioate
  modified_base 8: mod_base = OTHER; note = 2'-deoxyguanosine 3'-phosphorothioate
  modified_base 9..12: mod_base = OTHER; note = 5-methyl-2'-deoxycytidine 3'-phosphorothioate
  modified_base 13: mod_base = OTHER; note = 2'-deoxythymidine 3'-phosphorothioate
  modified_base 14..15: mod_base = OTHER; note = cEt guanosine 3'-phosphorothioate
  modified_base 16: mod_base = OTHER; note = cEt 5-methylcytidine
cggctgcgcccctggc

SEQ ID NO: 1218 - DNA, 16 bp, synthetic construct
  source 1..16: mol_type = other DNA
  modified_base 1: mod_base = OTHER; note = cEt guanosine 3'-phosphorothioate
  modified_base 2: mod_base = OTHER; note = cEt thymidine 3'-phosphorothioate
  modified_base 3: mod_base = OTHER; note = cEt 5-methylcytidine 3'-phosphorothioate
  modified_base 4..5: mod_base = OTHER; note = 2'-deoxyguanosine 3'-phosphorothioate
  modified_base 6: mod_base = OTHER; note = 5-methyl-2'-deoxycytidine 3'-phosphorothioate
  modified_base 7: mod_base = OTHER; note = 2'-deoxythymidine 3'-phosphorothioate
  modified_base 8: mod_base = OTHER; note = 2'-deoxyguanosine 3'-phosphorothioate
  modified_base 9: mod_base = OTHER; note = 5-methyl-2'-deoxycytidine 3'-phosphorothioate
  modified_base 10: mod_base = OTHER; note = 2'-deoxyguanosine 3'-phosphorothioate
  modified_base 11..13: mod_base = OTHER; note = 5-methyl-2'-deoxycytidine 3'-phosphorothioate
  modified_base 14: mod_base = OTHER; note = cEt 5-methylcytidine 3'-phosphorothioate
  modified_base 15: mod_base = OTHER; note = cEt thymidine 3'-phosphorothioate
  modified_base 16: mod_base = OTHER; note = cEt guanosine
gtcggctgcgcccctg

SEQ ID NO: 1219 - DNA, 16 bp, synthetic construct
  source 1..16: mol_type = other DNA
  modified_base 1: mod_base = OTHER; note = cEt 5-methylcytidine 3'-phosphorothioate
  modified_base 2: mod_base = OTHER; note = cEt thymidine 3'-phosphorothioate
  modified_base 3: mod_base = OTHER; note = cEt guanosine 3'-phosphorothioate
  modified_base 4: mod_base = OTHER; note = 2'-deoxythymidine 3'-phosphorothioate
  modified_base 5: mod_base = OTHER; note = 5-methyl-2'-deoxycytidine 3'-phosphorothioate
  modified_base 6..7: mod_base = OTHER; note = 2'-deoxyguanosine 3'-phosphorothioate
  modified_base 8: mod_base = OTHER; note = 5-methyl-2'-deoxycytidine 3'-phosphorothioate
  modified_base 9: mod_base = OTHER; note = 2'-deoxythymidine 3'-phosphorothioate
  modified_base 10: mod_base = OTHER; note = 2'-deoxyguanosine 3'-phosphorothioate
  modified_base 11: mod_base = OTHER; note = 5-methyl-2'-deoxycytidine 3'-phosphorothioate
  modified_base 12: mod_base = OTHER; note = 2'-deoxyguanosine 3'-phosphorothioate
  modified_base 13: mod_base = OTHER; note = 5-methyl-2'-deoxycytidine 3'-phosphorothioate
  modified_base 14..15: mod_base = OTHER; note = cEt 5-methylcytidine 3'-phosphorothioate
  modified_base 16: mod_base = OTHER; note = cEt 5-methylcytidine
ctgtcggctgcgcccc

SEQ ID NO: 1220 - DNA, 16 bp, synthetic construct
  source 1..16: mol_type = other DNA
  modified_base 1: mod_base = OTHER; note = cEt guanosine 3'-phosphorothioate
  modified_base 2..3: mod_base = OTHER; note = cEt 5-methylcytidine 3'-phosphorothioate
  modified_base 4: mod_base = OTHER; note = 2'-deoxythymidine 3'-phosphorothioate
  modified_base 5: mod_base = OTHER; note = 2'-deoxyguanosine 3'-phosphorothioate
  modified_base 6: mod_base = OTHER; note = 2'-deoxythymidine 3'-phosphorothioate
  modified_base 7: mod_base = OTHER; note = 5-methyl-2'-deoxycytidine 3'-phosphorothioate
  modified_base 8..9: mod_base = OTHER; note = 2'-deoxyguanosine 3'-phosphorothioate
  modified_base 10: mod_base = OTHER; note = 5-methyl-2'-deoxycytidine 3'-phosphorothioate
  modified_base 11: mod_base = OTHER; note = 2'-deoxythymidine 3'-phosphorothioate
  modified_base 12: mod_base = OTHER; note = 2'-deoxyguanosine 3'-phosphorothioate
  modified_base 13: mod_base = OTHER; note = 5-methyl-2'-deoxycytidine 3'-phosphorothioate
  modified_base 14: mod_base = OTHER; note = cEt guanosine 3'-phosphorothioate
  modified_base 15: mod_base = OTHER; note = cEt 5-methylcytidine 3'-phosphorothioate
  modified_base 16: mod_base = OTHER; note = cEt 5-methylcytidine
gcctgtcggctgcgcc

SEQ ID NO: 1221 - DNA, 16 bp, synthetic construct
  source 1..16: mol_type = other DNA
  modified_base 1: mod_base = OTHER; note = cEt 5-methylcytidine 3'-phosphorothioate
  modified_base 2: mod_base = OTHER; note = cEt thymidine 3'-phosphorothioate
  modified_base 3: mod_base = OTHER; note = cEt guanosine 3'-phosphorothioate
  modified_base 4..5: mod_base = OTHER; note = 5-methyl-2'-deoxycytidine 3'-phosphorothioate
  modified_base 6: mod_base = OTHER; note = 2'-deoxythymidine 3'-phosphorothioate
  modified_base 7: mod_base = OTHER; note = 2'-deoxyguanosine 3'-phosphorothioate
  modified_base 8: mod_base = OTHER; note = 2'-deoxythymidine 3'-phosphorothioate
  modified_base 9: mod_base = OTHER; note = 5-methyl-2'-deoxycytidine 3'-phosphorothioate
  modified_base 10..11: mod_base = OTHER; note = 2'-deoxyguanosine 3'-phosphorothioate
  modified_base 12: mod_base = OTHER; note = 5-methyl-2'-deoxycytidine 3'-phosphorothioate
  modified_base 13: mod_base = OTHER; note = 2'-deoxythymidine 3'-phosphorothioate
  modified_base 14: mod_base = OTHER; note = cEt guanosine 3'-phosphorothioate
  modified_base 15: mod_base = OTHER; note = cEt 5-methylcytidine 3'-phosphorothioate
  modified_base 16: mod_base = OTHER; note = cEt guanosine
ctgcctgtcggctgcg

SEQ ID NO: 1222 - DNA, 16 bp, synthetic construct
  source 1..16: mol_type = other DNA
  modified_base 1: mod_base = OTHER; note = cEt adenosine 3'-phosphorothioate
  modified_base 2..3: mod_base = OTHER; note = cEt 5-methylcytidine 3'-phosphorothioate
  modified_base 4: mod_base = OTHER; note = 2'-deoxythymidine 3'-phosphorothioate
  modified_base 5: mod_base = OTHER; note = 2'-deoxyguanosine 3'-phosphorothioate
  modified_base 6..7: mod_base = OTHER; note = 5-methyl-2'-deoxycytidine 3'-phosphorothioate
  modified_base 8: mod_base = OTHER; note = 2'-deoxythymidine 3'-phosphorothioate
  modified_base 9: mod_base = OTHER; note = 2'-deoxyguanosine 3'-phosphorothioate
  modified_base 10: mod_base = OTHER; note = 2'-deoxythymidine 3'-phosphorothioate
  modified_base 11: mod_base = OTHER; note = 5-methyl-2'-deoxycytidine 3'-phosphorothioate
  modified_base 12..13: mod_base = OTHER; note = 2'-deoxyguanosine 3'-phosphorothioate
  modified_base 14: mod_base = OTHER; note = cEt 5-methylcytidine 3'-phosphorothioate
  modified_base 15: mod_base = OTHER; note = cEt thymidine 3'-phosphorothioate
  modified_base 16: mod_base = OTHER; note = cEt guanosine
acctgcctgtcggctg

SEQ ID NO: 1223 - DNA, 16 bp, synthetic construct
  source 1..16: mol_type = other DNA
  modified_base 1: mod_base = OTHER; note = cEt adenosine 3'-phosphorothioate
  modified_base 2: mod_base = OTHER; note = cEt 5-methylcytidine 3'-phosphorothioate
  modified_base 3: mod_base = OTHER; note = cEt adenosine 3'-phosphorothioate
  modified_base 4..5: mod_base = OTHER; note = 5-methyl-2'-deoxycytidine 3'-phosphorothioate
  modified_base 6: mod_base = OTHER; note = 2'-deoxythymidine 3'-phosphorothioate
  modified_base 7: mod_base = OTHER; note = 2'-deoxyguanosine 3'-phosphorothioate
  modified_base 8..9: mod_base = OTHER; note = 5-methyl-2'-deoxycytidine 3'-phosphorothioate
  modified_base 10: mod_base = OTHER; note = 2'-deoxythymidine 3'-phosphorothioate
  modified_base 11: mod_base = OTHER; note = 2'-deoxyguanosine 3'-phosphorothioate
  modified_base 12: mod_base = OTHER; note = 2'-deoxythymidine 3'-phosphorothioate
  modified_base 13: mod_base = OTHER; note = 5-methyl-2'-deoxycytidine 3'-phosphorothioate
  modified_base 14..15: mod_base = OTHER; note = cEt guanosine 3'-phosphorothioate
  modified_base 16: mod_base = OTHER; note = cEt 5-methylcytidine
acacctgcctgtcggc

SEQ ID NO: 1224 - DNA, 16 bp, synthetic construct
  source 1..16: mol_type = other DNA
  modified_base 1: mod_base = OTHER; note = cEt guanosine 3'-phosphorothioate
  modified_base 2..3: mod_base = OTHER; note = cEt adenosine 3'-phosphorothioate
  modified_base 4: mod_base = OTHER; note = 5-methyl-2'-deoxycytidine 3'-phosphorothioate
  modified_base 5: mod_base = OTHER; note = 2'-deoxyadenosine 3'-phosphorothioate
  modified_base 6..7: mod_base = OTHER; note = 5-methyl-2'-deoxycytidine 3'-phosphorothioate
  modified_base 8: mod_base = OTHER; note = 2'-deoxythymidine 3'-phosphorothioate
  modified_base 9: mod_base = OTHER; note = 2'-deoxyguanosine 3'-phosphorothioate
  modified_base 10..11: mod_base = OTHER; note = 5-methyl-2'-deoxycytidine 3'-phosphorothioate
  modified_base 12: mod_base = OTHER; note = 2'-deoxythymidine 3'-phosphorothioate
  modified_base 13: mod_base = OTHER; note = 2'-deoxyguanosine 3'-phosphorothioate
  modified_base 14: mod_base = OTHER; note = cEt thymidine 3'-phosphorothioate
  modified_base 15: mod_base = OTHER; note = cEt 5-methylcytidine 3'-phosphorothioate
  modified_base 16: mod_base = OTHER; note = cEt guanosine
gaacacctgcctgtcg

SEQ ID NO: 1225 - DNA, 16 bp, synthetic construct
  source 1..16: mol_type = other DNA
  modified_base 1..2: mod_base = OTHER; note = cEt 5-methylcytidine 3'-phosphorothioate
  modified_base 3: mod_base = OTHER; note = cEt guanosine 3'-phosphorothioate
  modified_base 4..5: mod_base = OTHER; note = 2'-deoxyadenosine 3'-phosphorothioate
  modified_base 6: mod_base = OTHER; note = 5-methyl-2'-deoxycytidine 3'-phosphorothioate
  modified_base 7: mod_base = OTHER; note = 2'-deoxyadenosine 3'-phosphorothioate
  modified_base 8..9: mod_base = OTHER; note = 5-methyl-2'-deoxycytidine 3'-phosphorothioate
  modified_base 10: mod_base = OTHER; note = 2'-deoxythymidine 3'-phosphorothioate
  modified_base 11: mod_base = OTHER; note = 2'-deoxyguanosine 3'-phosphorothioate
  modified_base 12..13: mod_base = OTHER; note = 5-methyl-2'-deoxycytidine 3'-phosphorothioate
  modified_base 14: mod_base = OTHER; note = cEt thymidine 3'-phosphorothioate
  modified_base 15: mod_base = OTHER; note = cEt guanosine 3'-phosphorothioate
  modified_base 16: mod_base = OTHER; note = cEt thymidine
ccgaacacctgcctgt

SEQ ID NO: 1226 - DNA, 16 bp, synthetic construct
  source 1..16: mol_type = other DNA
  modified_base 1: mod_base = OTHER; note = cEt 5-methylcytidine 3'-phosphorothioate
  modified_base 2: mod_base = OTHER; note = cEt guanosine 3'-phosphorothioate
  modified_base 3: mod_base = OTHER; note = cEt 5-methylcytidine 3'-phosphorothioate
  modified_base 4: mod_base = OTHER; note = 5-methyl-2'-deoxycytidine 3'-phosphorothioate
  modified_base 5: mod_base = OTHER; note = 2'-deoxyguanosine 3'-phosphorothioate
  modified_base 6..7: mod_base = OTHER; note = 2'-deoxyadenosine 3'-phosphorothioate
  modified_base 8: mod_base = OTHER; note = 5-methyl-2'-deoxycytidine 3'-phosphorothioate
  modified_base 9: mod_base = OTHER; note = 2'-deoxyadenosine 3'-phosphorothioate
  modified_base 10..11: mod_base = OTHER; note = 5-methyl-2'-deoxycytidine 3'-phosphorothioate
  modified_base 12: mod_base = OTHER; note = 2'-deoxythymidine 3'-phosphorothioate
  modified_base 13: mod_base = OTHER; note = 2'-deoxyguanosine 3'-phosphorothioate
  modified_base 14..15: mod_base = OTHER; note = cEt 5-methylcytidine 3'-phosphorothioate
  modified_base 16: mod_base = OTHER; note = cEt thymidine
cgccgaacacctgcct

SEQ ID NO: 1227 - DNA, 16 bp, synthetic construct
  source 1..16: mol_type = other DNA
  modified_base 1..2: mod_base = OTHER; note = cEt 5-methylcytidine 3'-phosphorothioate
  modified_base 3: mod_base = OTHER; note = cEt thymidine 3'-phosphorothioate
  modified_base 4..6: mod_base = OTHER; note = 2'-deoxyguanosine 3'-phosphorothioate
  modified_base 7: mod_base = OTHER; note = 5-methyl-2'-deoxycytidine 3'-phosphorothioate
  modified_base 8: mod_base = OTHER; note = 2'-deoxyadenosine 3'-phosphorothioate
  modified_base 9..10: mod_base = OTHER; note = 5-methyl-2'-deoxycytidine 3'-phosphorothioate
  modified_base 11: mod_base = OTHER; note = 2'-deoxythymidine 3'-phosphorothioate
  modified_base 12: mod_base = OTHER; note = 2'-deoxyguanosine 3'-phosphorothioate
  modified_base 13: mod_base = OTHER; note = 2'-deoxythymidine 3'-phosphorothioate
  modified_base 14: mod_base = OTHER; note = cEt thymidine 3'-phosphorothioate
  modified_base 15: mod_base = OTHER; note = cEt guanosine 3'-phosphorothioate
  modified_base 16: mod_base = OTHER; note = cEt guanosine
cctgggcacctgttgg

SEQ ID NO: 1228 - DNA, 16 bp, synthetic construct
  source 1..16: mol_type = other DNA
  modified_base 1: mod_base = OTHER; note = cEt guanosine 3'-phosphorothioate
  modified_base 2: mod_base = OTHER; note = cEt thymidine 3'-phosphorothioate
  modified_base 3: mod_base = OTHER; note = cEt guanosine 3'-phosphorothioate
  modified_base 4..5: mod_base = OTHER; note = 5-methyl-2'-deoxycytidine 3'-phosphorothioate
  modified_base 6: mod_base = OTHER; note = 2'-deoxythymidine 3'-phosphorothioate
  modified_base 7..9: mod_base = OTHER; note = 2'-deoxyguanosine 3'-phosphorothioate
  modified_base 10: mod_base = OTHER; note = 5-methyl-2'-deoxycytidine 3'-phosphorothioate
  modified_base 11: mod_base = OTHER; note = 2'-deoxyadenosine 3'-phosphorothioate
  modified_base 12..13: mod_base = OTHER; note = 5-methyl-2'-deoxycytidine 3'-phosphorothioate
  modified_base 14: mod_base = OTHER; note = cEt thymidine 3'-phosphorothioate
  modified_base 15: mod_base = OTHER; note = cEt guanosine 3'-phosphorothioate
  modified_base 16: mod_base = OTHER; note = cEt thymidine
gtgcctgggcacctgt

SEQ ID NO: 1229 - DNA, 16 bp, synthetic construct
  source 1..16: mol_type = other DNA
  modified_base 1: mod_base = OTHER; note = cEt 5-methylcytidine 3'-phosphorothioate
  modified_base 2: mod_base = OTHER; note = cEt guanosine 3'-phosphorothioate
  modified_base 3: mod_base = OTHER; note = cEt 5-methylcytidine 3'-phosphorothioate
  modified_base 4..5: mod_base = OTHER; note = 5-methyl-2'-deoxycytidine 3'-phosphorothioate
  modified_base 6: mod_base = OTHER; note = 2'-deoxythymidine 3'-phosphorothioate
  modified_base 7..9: mod_base = OTHER; note = 5-methyl-2'-deoxycytidine 3'-phosphorothioate
  modified_base 10: mod_base = OTHER; note = 2'-deoxyadenosine 3'-phosphorothioate
  modified_base 11: mod_base = OTHER; note = 2'-deoxyguanosine 3'-phosphorothioate
  modified_base 12: mod_base = OTHER; note = 2'-deoxythymidine 3'-phosphorothioate
  modified_base 13: mod_base = OTHER; note = 2'-deoxyguanosine 3'-phosphorothioate
  modified_base 14..15: mod_base = OTHER; note = cEt 5-methylcytidine 3'-phosphorothioate
  modified_base 16: mod_base = OTHER; note = cEt thymidine
cgccctcccagtgcct

SEQ ID NO: 1230 - DNA, 16 bp, synthetic construct
  source 1..16: mol_type = other DNA
  modified_base 1: mod_base = OTHER; note = cEt adenosine 3'-phosphorothioate
  modified_base 2..3: mod_base = OTHER; note = cEt 5-methylcytidine 3'-phosphorothioate
  modified_base 4: mod_base = OTHER; note = 2'-deoxyguanosine 3'-phosphorothioate
  modified_base 5..7: mod_base = OTHER; note = 5-methyl-2'-deoxycytidine 3'-phosphorothioate
  modified_base 8: mod_base = OTHER; note = 2'-deoxythymidine 3'-phosphorothioate
  modified_base 9..11: mod_base = OTHER; note = 5-methyl-2'-deoxycytidine 3'-phosphorothioate
  modified_base 12: mod_base = OTHER; note = 2'-deoxyadenosine 3'-phosphorothioate
  modified_base 13: mod_base = OTHER; note = 2'-deoxyguanosine 3'-phosphorothioate
  modified_base 14: mod_base = OTHER; note = cEt thymidine 3'-phosphorothioate
  modified_base 15: mod_base = OTHER; note = cEt guanosine 3'-phosphorothioate
  modified_base 16: mod_base = OTHER; note = cEt 5-methylcytidine
accgccctcccagtgc

SEQ ID NO: 1231 - DNA, 16 bp, synthetic construct
  source 1..16: mol_type = other DNA
  modified_base 1: mod_base = OTHER; note = cEt thymidine 3'-phosphorothioate
  modified_base 2: mod_base = OTHER; note = cEt 5-methylcytidine 3'-phosphorothioate
  modified_base 3: mod_base = OTHER; note = cEt adenosine 3'-phosphorothioate
  modified_base 4..5: mod_base = OTHER; note = 5-methyl-2'-deoxycytidine 3'-phosphorothioate
  modified_base 6: mod_base = OTHER; note = 2'-deoxyguanosine 3'-phosphorothioate
  modified_base 7..9: mod_base = OTHER; note = 5-methyl-2'-deoxycytidine 3'-phosphorothioate
  modified_base 10: mod_base = OTHER; note = 2'-deoxythymidine 3'-phosphorothioate
  modified_base 11..13: mod_base = OTHER; note = 5-methyl-2'-deoxycytidine 3'-phosphorothioate
  modified_base 14: mod_base = OTHER; note = cEt adenosine 3'-phosphorothioate
  modified_base 15: mod_base = OTHER; note = cEt guanosine 3'-phosphorothioate
  modified_base 16: mod_base = OTHER; note = cEt thymidine
tcaccgccctcccagt

SEQ ID NO: 1232 - DNA, 16 bp, synthetic construct
  source 1..16: mol_type = other DNA
  modified_base 1: mod_base = OTHER; note = cEt adenosine 3'-phosphorothioate
  modified_base 2: mod_base = OTHER; note = cEt guanosine 3'-phosphorothioate
  modified_base 3: mod_base = OTHER; note = cEt thymidine 3'-phosphorothioate
  modified_base 4: mod_base = OTHER; note = 5-methyl-2'-deoxycytidine 3'-phosphorothioate
  modified_base 5: mod_base = OTHER; note = 2'-deoxyadenosine 3'-phosphorothioate
  modified_base 6..7: mod_base = OTHER; note = 5-methyl-2'-deoxycytidine 3'-phosphorothioate
  modified_base 8: mod_base = OTHER; note = 2'-deoxyguanosine 3'-phosphorothioate
  modified_base 9..11: mod_base = OTHER; note = 5-methyl-2'-deoxycytidine 3'-phosphorothioate
  modified_base 12: mod_base = OTHER; note = 2'-deoxythymidine 3'-phosphorothioate
  modified_base 13: mod_base = OTHER; note = 5-methyl-2'-deoxycytidine 3'-phosphorothioate
  modified_base 14..15: mod_base = OTHER; note = cEt 5-methylcytidine 3'-phosphorothioate
  modified_base 16: mod_base = OTHER; note = cEt adenosine
agtcaccgccctccca

SEQ ID NO: 1233 - DNA, 16 bp, synthetic construct
  source 1..16: mol_type = other DNA
  modified_base 1: mod_base = OTHER; note = cEt thymidine 3'-phosphorothioate
  modified_base 2: mod_base = OTHER; note = cEt guanosine 3'-phosphorothioate
  modified_base 3: mod_base = OTHER; note = cEt adenosine 3'-phosphorothioate
  modified_base 4: mod_base = OTHER; note = 2'-deoxyguanosine 3'-phosphorothioate
  modified_base 5: mod_base = OTHER; note = 2'-deoxythymidine 3'-phosphorothioate
  modified_base 6: mod_base = OTHER; note = 5-methyl-2'-deoxycytidine 3'-phosphorothioate
  modified_base 7: mod_base = OTHER; note = 2'-deoxyadenosine 3'-phosphorothioate
  modified_base 8..9: mod_base = OTHER; note = 5-methyl-2'-deoxycytidine 3'-phosphorothioate
  modified_base 10: mod_base = OTHER; note = 2'-deoxyguanosine 3'-phosphorothioate
  modified_base 11..13: mod_base = OTHER; note = 5-methyl-2'-deoxycytidine 3'-phosphorothioate
  modified_base 14: mod_base = OTHER; note = cEt thymidine 3'-phosphorothioate
  modified_base 15: mod_base = OTHER; note = cEt 5-methylcytidine 3'-phosphorothioate
  modified_base 16: mod_base = OTHER; note = cEt 5-methylcytidine
tgagtcaccgccctcc

SEQ ID NO: 1234 - DNA, 16 bp, synthetic construct
  source 1..16: mol_type = other DNA
  modified_base 1: mod_base = OTHER; note = cEt 5-methylcytidine 3'-phosphorothioate
  modified_base 2: mod_base = OTHER; note = cEt guanosine 3'-phosphorothioate
  modified_base 3: mod_base = OTHER; note = cEt thymidine 3'-phosphorothioate
  modified_base 4: mod_base = OTHER; note = 2'-deoxyguanosine 3'-phosphorothioate
  modified_base 5: mod_base = OTHER; note = 2'-deoxyadenosine 3'-phosphorothioate
  modified_base 6: mod_base = OTHER; note = 2'-deoxyguanosine 3'-phosphorothioate
  modified_base 7: mod_base = OTHER; note = 2'-deoxythymidine 3'-phosphorothioate
  modified_base 8: mod_base = OTHER; note = 5-methyl-2'-deoxycytidine 3'-phosphorothioate
  modified_base 9: mod_base = OTHER; note = 2'-deoxyadenosine 3'-phosphorothioate
  modified_base 10..11: mod_base = OTHER; note = 5-methyl-2'-deoxycytidine 3'-phosphorothioate
  modified_base 12: mod_base = OTHER; note = 2'-deoxyguanosine 3'-phosphorothioate
  modified_base 13: mod_base = OTHER; note = 5-methyl-2'-deoxycytidine 3'-phosphorothioate
  modified_base 14..15: mod_base = OTHER; note = cEt 5-methylcytidine 3'-phosphorothioate
  modified_base 16: mod_base = OTHER; note = cEt thymidine
cgtgagtcaccgccct

SEQ ID NO: 1235 - DNA, 16 bp, synthetic construct
  source 1..16: mol_type = other DNA
  modified_base 1: mod_base = OTHER; note = cEt 5-methylcytidine 3'-phosphorothioate
  modified_base 2..3: mod_base = OTHER; note = cEt adenosine 3'-phosphorothioate
  modified_base 4: mod_base = OTHER; note = 2'-deoxyadenosine 3'-phosphorothioate
  modified_base 5: mod_base = OTHER; note = 2'-deoxyguanosine 3'-phosphorothioate
  modified_base 6: mod_base = OTHER; note = 5-methyl-2'-deoxycytidine 3'-phosphorothioate
  modified_base 7: mod_base = OTHER; note = 2'-deoxythymidine 3'-phosphorothioate
  modified_base 8..9: mod_base = OTHER; note = 2'-deoxyguanosine 3'-phosphorothioate
  modified_base 10..11: mod_base = OTHER; note = 2'-deoxythymidine 3'-phosphorothioate
  modified_base 12: mod_base = OTHER; note = 5-methyl-2'-deoxycytidine 3'-phosphorothioate
  modified_base 13: mod_base = OTHER; note = 2'-deoxythymidine 3'-phosphorothioate
  modified_base 14..15: mod_base = OTHER; note = cEt 5-methylcytidine 3'-phosphorothioate
  modified_base 16: mod_base = OTHER; note = cEt 5-methylcytidine
caaagctggttctccc

SEQ ID NO: 1236 - DNA, 16 bp, synthetic construct
  source 1..16: mol_type = other DNA
  modified_base 1: mod_base = OTHER; note = cEt thymidine 3'-phosphorothioate
  modified_base 2: mod_base = OTHER; note = cEt guanosine 3'-phosphorothioate
  modified_base 3: mod_base = OTHER; note = cEt 5-methylcytidine 3'-phosphorothioate
  modified_base 4..6: mod_base = OTHER; note = 2'-deoxyadenosine 3'-phosphorothioate
  modified_base 7: mod_base = OTHER; note = 2'-deoxyguanosine 3'-phosphorothioate
  modified_base 8: mod_base = OTHER; note = 5-methyl-2'-deoxycytidine 3'-phosphorothioate
  modified_base 9: mod_base = OTHER; note = 2'-deoxythymidine 3'-phosphorothioate
  modified_base 10..11: mod_base = OTHER; note = 2'-deoxyguanosine 3'-phosphorothioate
  modified_base 12..13: mod_base = OTHER; note = 2'-deoxythymidine 3'-phosphorothioate
  modified_base 14: mod_base = OTHER; note = cEt 5-methylcytidine 3'-phosphorothioate
  modified_base 15: mod_base = OTHER; note = cEt thymidine 3'-phosphorothioate
  modified_base 16: mod_base = OTHER; note = cEt 5-methylcytidine
tgcaaagctggttctc

SEQ ID NO: 1237 - DNA, 16 bp, synthetic construct
  source 1..16: mol_type = other DNA
  modified_base 1: mod_base = OTHER; note = cEt thymidine 3'-phosphorothioate
  modified_base 2: mod_base = OTHER; note = cEt 5-methylcytidine 3'-phosphorothioate
  modified_base 3: mod_base = OTHER; note = cEt thymidine 3'-phosphorothioate
  modified_base 4: mod_base = OTHER; note = 2'-deoxyguanosine 3'-phosphorothioate
  modified_base 5: mod_base = OTHER; note = 5-methyl-2'-deoxycytidine 3'-phosphorothioate
  modified_base 6..8: mod_base = OTHER; note = 2'-deoxyadenosine 3'-phosphorothioate
  modified_base 9: mod_base = OTHER; note = 2'-deoxyguanosine 3'-phosphorothioate
  modified_base 10: mod_base = OTHER; note = 5-methyl-2'-deoxycytidine 3'-phosphorothioate
  modified_base 11: mod_base = OTHER; note = 2'-deoxythymidine 3'-phosphorothioate
  modified_base 12..13: mod_base = OTHER; note = 2'-deoxyguanosine 3'-phosphorothioate
  modified_base 14..15: mod_base = OTHER; note = cEt thymidine 3'-phosphorothioate
  modified_base 16: mod_base = OTHER; note = cEt 5-methylcytidine
tctgcaaagctggttc

SEQ ID NO: 1238 - DNA, 16 bp, synthetic construct
  source 1..16: mol_type = other DNA
  modified_base 1: mod_base = OTHER; note = cEt thymidine 3'-phosphorothioate
  modified_base 2: mod_base = OTHER; note = cEt guanosine 3'-phosphorothioate
  modified_base 3: mod_base = OTHER; note = cEt thymidine 3'-phosphorothioate
  modified_base 4: mod_base = OTHER; note = 5-methyl-2'-deoxycytidine 3'-phosphorothioate
  modified_base 5: mod_base = OTHER; note = 2'-deoxythymidine 3'-phosphorothioate
  modified_base 6: mod_base = OTHER; note = 2'-deoxyguanosine 3'-phosphorothioate
  modified_base 7: mod_base = OTHER; note = 5-methyl-2'-deoxycytidine 3'-phosphorothioate
  modified_base 8..10: mod_base = OTHER; note = 2'-deoxyadenosine 3'-phosphorothioate
  modified_base 11: mod_base = OTHER; note = 2'-deoxyguanosine 3'-phosphorothioate
  modified_base 12: mod_base = OTHER; note = 5-methyl-2'-deoxycytidine 3'-phosphorothioate
  modified_base 13: mod_base = OTHER; note = 2'-deoxythymidine 3'-phosphorothioate
  modified_base 14..15: mod_base = OTHER; note = cEt guanosine 3'-phosphorothioate
  modified_base 16: mod_base = OTHER; note = cEt thymidine
tgtctgcaaagctggt

SEQ ID NO: 1239 - DNA, 16 bp, synthetic construct
  source 1..16: mol_type = other DNA
  modified_base 1..2: mod_base = OTHER; note = cEt 5-methylcytidine 3'-phosphorothioate
  modified_base 3: mod_base = OTHER; note = cEt thymidine 3'-phosphorothioate
  modified_base 4: mod_base = OTHER; note = 2'-deoxyguanosine 3'-phosphorothioate
  modified_base 5: mod_base = OTHER; note = 2'-deoxythymidine 3'-phosphorothioate
  modified_base 6: mod_base = OTHER; note = 5-methyl-2'-deoxycytidine 3'-phosphorothioate
  modified_base 7: mod_base = OTHER; note = 2'-deoxythymidine 3'-phosphorothioate
  modified_base 8: mod_base = OTHER; note = 2'-deoxyguanosine 3'-phosphorothioate
  modified_base 9: mod_base = OTHER; note = 5-methyl-2'-deoxycytidine 3'-phosphorothioate
  modified_base 10..12: mod_base = OTHER; note = 2'-deoxyadenosine 3'-phosphorothioate
  modified_base 13: mod_base = OTHER; note = 2'-deoxyguanosine 3'-phosphorothioate
  modified_base 14: mod_base = OTHER; note = cEt 5-methylcytidine 3'-phosphorothioate
  modified_base 15: mod_base = OTHER; note = cEt thymidine 3'-phosphorothioate
  modified_base 16: mod_base = OTHER; note = cEt guanosine
cctgtctgcaaagctg

SEQ ID NO: 1240 - DNA, 16 bp, synthetic construct
  source 1..16: mol_type = other DNA
  modified_base 1: mod_base = OTHER; note = cEt 5-methylcytidine 3'-phosphorothioate
  modified_base 2: mod_base = OTHER; note = cEt guanosine 3'-phosphorothioate
  modified_base 3: mod_base = OTHER; note = cEt 5-methylcytidine 3'-phosphorothioate
  modified_base 4: mod_base = OTHER; note = 5-methyl-2'-deoxycytidine 3'-phosphorothioate
  modified_base 5: mod_base = OTHER; note = 2'-deoxythymidine 3'-phosphorothioate
  modified_base 6: mod_base = OTHER; note = 2'-deoxyguanosine 3'-phosphorothioate
  modified_base 7: mod_base = OTHER; note = 2'-deoxythymidine 3'-phosphorothioate
  modified_base 8: mod_base = OTHER; note = 5-methyl-2'-deoxycytidine 3'-phosphorothioate
  modified_base 9: mod_base = OTHER; note = 2'-deoxythymidine 3'-phosphorothioate
  modified_base 10: mod_base = OTHER; note = 2'-deoxyguanosine 3'-phosphorothioate
  modified_base 11: mod_base = OTHER; note = 5-methyl-2'-deoxycytidine 3'-phosphorothioate
  modified_base 12..13: mod_base = OTHER; note = 2'-deoxyadenosine 3'-phosphorothioate
  modified_base 14: mod_base = OTHER; note = cEt adenosine 3'-phosphorothioate
  modified_base 15: mod_base = OTHER; note = cEt guanosine 3'-phosphorothioate
  modified_base 16: mod_base = OTHER; note = cEt 5-methylcytidine
cgcctgtctgcaaagc

SEQ ID NO: 1241 - DNA, 16 bp, synthetic construct
  source 1..16: mol_type = other DNA
  modified_base 1..2: mod_base = OTHER; note = cEt thymidine 3'-phosphorothioate
  modified_base 3: mod_base = OTHER; note = cEt guanosine 3'-phosphorothioate
  modified_base 4: mod_base = OTHER; note = 2'-deoxythymidine 3'-phosphorothioate
  modified_base 5..7: mod_base = OTHER; note = 5-methyl-2'-deoxycytidine 3'-phosphorothioate
  modified_base 8: mod_base = OTHER; note = 2'-deoxythymidine 3'-phosphorothioate
  modified_base 9..10: mod_base = OTHER; note = 5-methyl-2'-deoxycytidine 3'-phosphorothioate
  modified_base 11: mod_base = OTHER; note = 2'-deoxythymidine 3'-phosphorothioate
  modified_base 12..13: mod_base = OTHER; note = 2'-deoxyguanosine 3'-phosphorothioate
  modified_base 14: mod_base = OTHER; note = cEt adenosine 3'-phosphorothioate
  modified_base 15: mod_base = OTHER; note = cEt thymidine 3'-phosphorothioate
  modified_base 16: mod_base = OTHER; note = cEt 5-methylcytidine
ttgtccctcctggatc

SEQ ID NO: 1242 - DNA, 16 bp, synthetic construct
  source 1..16: mol_type = other DNA
  modified_base 1: mod_base = OTHER; note = cEt adenosine 3'-phosphorothioate
  modified_base 2: mod_base = OTHER; note = cEt guanosine 3'-phosphorothioate
  modified_base 3: mod_base = OTHER; note = cEt thymidine 3'-phosphorothioate
  modified_base 4: mod_base = OTHER; note = 2'-deoxythymidine 3'-phosphorothioate
  modified_base 6: mod_base = OTHER; note = 2'-deoxythymidine 3'-phosphorothioate
  modified_base 7..9: mod_base = OTHER; note = 5-methyl-2'-deoxycytidine 3'-phosphorothioate
  modified_base 5: mod_base = OTHER; note = 2'-deoxyguanosine 3'-phosphorothioate
  modified_base 10: mod_base = OTHER; note = 2'-deoxythymidine 3'-phosphorothioate
  modified_base 11..12: mod_base = OTHER; note = 5-methyl-2'-deoxycytidine 3'-phosphorothioate
  modified_base 13: mod_base = OTHER; note = 2'-deoxythymidine 3'-phosphorothioate
  modified_base 14..15: mod_base = OTHER; note = cEt guanosine 3'-phosphorothioate
  modified_base 16: mod_base = OTHER; note = cEt adenosine
agttgtccctcctgga

SEQ ID NO: 1243 - DNA, 16 bp, synthetic construct
  source 1..16: mol_type = other DNA
  modified_base 1..3: mod_base = OTHER; note = cEt adenosine 3'-phosphorothioate
  modified_base 4: mod_base = OTHER; note = 2'-deoxyguanosine 3'-phosphorothioate
  modified_base 5..6: mod_base = OTHER; note = 2'-deoxythymidine 3'-phosphorothioate
  modified_base 7: mod_base = OTHER; note = 2'-deoxyguanosine 3'-phosphorothioate
  modified_base 8: mod_base = OTHER; note = 2'-deoxythymidine 3'-phosphorothioate
  modified_base 9..11: mod_base = OTHER; note = 5-methyl-2'-deoxycytidine 3'-phosphorothioate
  modified_base 12: mod_base = OTHER; note = 2'-deoxythymidine 3'-phosphorothioate
  modified_base 13: mod_base = OTHER; note = 5-methyl-2'-deoxycytidine 3'-phosphorothioate
  modified_base 14: mod_base = OTHER; note = cEt 5-methylcytidine 3'-phosphorothioate
  modified_base 15: mod_base = OTHER; note = cEt thymidine 3'-phosphorothioate
  modified_base 16: mod_base = OTHER; note = cEt guanosine
aaagttgtccctcctg

SEQ ID NO: 1244 - DNA, 16 bp, synthetic construct
  source 1..16: mol_type = other DNA
  modified_base 1..2: mod_base = OTHER; note = cEt 5-methylcytidine 3'-phosphorothioate
  modified_base 3: mod_base = OTHER; note = cEt adenosine 3'-phosphorothioate
  modified_base 4..5: mod_base = OTHER; note = 2'-deoxyadenosine 3'-phosphorothioate
  modified_base 6: mod_base = OTHER; note = 2'-deoxyguanosine 3'-phosphorothioate
  modified_base 7..8: mod_base = OTHER; note = 2'-deoxythymidine 3'-phosphorothioate
  modified_base 9: mod_base = OTHER; note = 2'-deoxyguanosine 3'-phosphorothioate
  modified_base 10: mod_base = OTHER; note = 2'-deoxythymidine 3'-phosphorothioate
  modified_base 11..13: mod_base = OTHER; note = 5-methyl-2'-deoxycytidine 3'-phosphorothioate
  modified_base 14: mod_base = OTHER; note = cEt thymidine 3'-phosphorothioate
  modified_base 15: mod_base = OTHER; note = cEt 5-methylcytidine 3'-phosphorothioate
  modified_base 16: mod_base = OTHER; note = cEt 5-methylcytidine
ccaaagttgtccctcc

SEQ ID NO: 1245 - DNA, 16 bp, synthetic construct
  source 1..16: mol_type = other DNA
  modified_base 1: mod_base = OTHER; note = cEt adenosine 3'-phosphorothioate
  modified_base 2..3: mod_base = OTHER; note = cEt 5-methylcytidine 3'-phosphorothioate
  modified_base 4: mod_base = OTHER; note = 5-methyl-2'-deoxycytidine 3'-phosphorothioate
  modified_base 5..7: mod_base = OTHER; note = 2'-deoxyadenosine 3'-phosphorothioate
  modified_base 8: mod_base = OTHER; note = 2'-deoxyguanosine 3'-phosphorothioate
  modified_base 9..10: mod_base = OTHER; note = 2'-deoxythymidine 3'-phosphorothioate
  modified_base 11: mod_base = OTHER; note = 2'-deoxyguanosine 3'-phosphorothioate
  modified_base 12: mod_base = OTHER; note = 2'-deoxythymidine 3'-phosphorothioate
  modified_base 13: mod_base = OTHER; note = 5-methyl-2'-deoxycytidine 3'-phosphorothioate
  modified_base 14..15: mod_base = OTHER; note = cEt 5-methylcytidine 3'-phosphorothioate
  modified_base 16: mod_base = OTHER; note = cEt thymidine
acccaaagttgtccct

SEQ ID NO: 1246 - DNA, 16 bp, synthetic construct
  source 1..16: mol_type = other DNA
  modified_base 1: mod_base = OTHER; note = cEt guanosine 3'-phosphorothioate
  modified_base 2..3: mod_base = OTHER; note = cEt adenosine 3'-phosphorothioate
  modified_base 4..6: mod_base = OTHER; note = 5-methyl-2'-deoxycytidine 3'-phosphorothioate
  modified_base 7..9: mod_base = OTHER; note = 2'-deoxyadenosine 3'-phosphorothioate
  modified_base 10: mod_base = OTHER; note = 2'-deoxyguanosine 3'-phosphorothioate
  modified_base 11..12: mod_base = OTHER; note = 2'-deoxythymidine 3'-phosphorothioate
  modified_base 13: mod_base = OTHER; note = 2'-deoxyguanosine 3'-phosphorothioate
  modified_base 14: mod_base = OTHER; note = cEt thymidine 3'-phosphorothioate
  modified_base 15: mod_base = OTHER; note = cEt 5-methylcytidine 3'-phosphorothioate
  modified_base 16: mod_base = OTHER; note = cEt 5-methylcytidine
gaacccaaagttgtcc

SEQ ID NO: 1247 - DNA, 16 bp, synthetic construct
  source 1..16: mol_type = other DNA
  modified_base 1: mod_base = OTHER; note = cEt guanosine 3'-phosphorothioate
  modified_base 2..3: mod_base = OTHER; note = cEt adenosine 3'-phosphorothioate
  modified_base 4: mod_base = OTHER; note = 2'-deoxyguanosine 3'-phosphorothioate
  modified_base 5..6: mod_base = OTHER; note = 2'-deoxyadenosine 3'-phosphorothioate
  modified_base 7..9: mod_base = OTHER; note = 5-methyl-2'-deoxycytidine 3'-phosphorothioate
  modified_base 10..12: mod_base = OTHER; note = 2'-deoxyadenosine 3'-phosphorothioate
  modified_base 13: mod_base = OTHER; note = 2'-deoxyguanosine 3'-phosphorothioate
  modified_base 14..15: mod_base = OTHER; note = cEt thymidine 3'-phosphorothioate
  modified_base 16: mod_base = OTHER; note = cEt guanosine
gaagaacccaaagttg

SEQ ID NO: 1248 - DNA, 16 bp, synthetic construct
  source 1..16: mol_type = other DNA
  modified_base 1..2: mod_base = OTHER; note = cEt 5-methylcytidine 3'-phosphorothioate
  modified_base 3: mod_base = OTHER; note = cEt adenosine 3'-phosphorothioate
  modified_base 4: mod_base = OTHER; note = 2'-deoxyguanosine 3'-phosphorothioate
  modified_base 5..6: mod_base = OTHER; note = 2'-deoxyadenosine 3'-phosphorothioate
  modified_base 7: mod_base = OTHER; note = 2'-deoxyguanosine 3'-phosphorothioate
  modified_base 8..9: mod_base = OTHER; note = 2'-deoxyadenosine 3'-phosphorothioate
  modified_base 10..12: mod_base = OTHER; note = 5-methyl-2'-deoxycytidine 3'-phosphorothioate
  modified_base 13: mod_base = OTHER; note = 2'-deoxyadenosine 3'-phosphorothioate
  modified_base 14..15: mod_base = OTHER; note = cEt adenosine 3'-phosphorothioate
  modified_base 16: mod_base = OTHER; note = cEt guanosine
ccagaagaacccaaag

SEQ ID NO: 1249 - DNA, 16 bp, synthetic construct
  source 1..16: mol_type = other DNA
  modified_base 1: mod_base = OTHER; note = cEt 5-methylcytidine 3'-phosphorothioate
  modified_base 3: mod_base = OTHER; note = cEt 5-methylcytidine 3'-phosphorothioate
  modified_base 2: mod_base = OTHER; note = cEt adenosine 3'-phosphorothioate
  modified_base 4..5: mod_base = OTHER; note = 5-methyl-2'-deoxycytidine 3'-phosphorothioate
  modified_base 6: mod_base = OTHER; note = 2'-deoxyadenosine 3'-phosphorothioate
  modified_base 7: mod_base = OTHER; note = 2'-deoxyguanosine 3'-phosphorothioate
  modified_base 8..9: mod_base = OTHER; note = 2'-deoxyadenosine 3'-phosphorothioate
  modified_base 10: mod_base = OTHER; note = 2'-deoxyguanosine 3'-phosphorothioate
  modified_base 11..12: mod_base = OTHER; note = 2'-deoxyadenosine 3'-phosphorothioate
  modified_base 13: mod_base = OTHER; note = 5-methyl-2'-deoxycytidine 3'-phosphorothioate
  modified_base 14..15: mod_base = OTHER; note = cEt 5-methylcytidine 3'-phosphorothioate
  modified_base 16: mod_base = OTHER; note = cEt adenosine
cacccagaagaaccca

SEQ ID NO: 1250 - DNA, 16 bp, synthetic construct
  source 1..16: mol_type = other DNA
  modified_base 1: mod_base = OTHER; note = cEt guanosine 3'-phosphorothioate
  modified_base 2: mod_base = OTHER; note = cEt 5-methylcytidine 3'-phosphorothioate
  modified_base 3: mod_base = OTHER; note = cEt adenosine 3'-phosphorothioate
  modified_base 4: mod_base = OTHER; note = 2'-deoxyguanosine 3'-phosphorothioate
  modified_base 5..6: mod_base = OTHER; note = 2'-deoxyadenosine 3'-phosphorothioate
  modified_base 7..8: mod_base = OTHER; note = 5-methyl-2'-deoxycytidine 3'-phosphorothioate
  modified_base 9: mod_base = OTHER; note = 2'-deoxythymidine 3'-phosphorothioate
  modified_base 10: mod_base = OTHER; note = 2'-deoxyadenosine 3'-phosphorothioate
  modified_base 11: mod_base = OTHER; note = 5-methyl-2'-deoxycytidine 3'-phosphorothioate
  modified_base 12..13: mod_base = OTHER; note = 2'-deoxyadenosine 3'-phosphorothioate
  modified_base 14..15: mod_base = OTHER; note = cEt adenosine 3'-phosphorothioate
  modified_base 16: mod_base = OTHER; note = cEt guanosine
gcagaacctacaaaag

SEQ ID NO: 1251 - DNA, 16 bp, synthetic construct
  source 1..16: mol_type = other DNA
  modified_base 1: mod_base = OTHER; note = cEt guanosine 3'-phosphorothioate
  modified_base 2: mod_base = OTHER; note = cEt thymidine 3'-phosphorothioate
  modified_base 3: mod_base = OTHER; note = cEt guanosine 3'-phosphorothioate
  modified_base 4: mod_base = OTHER; note = 5-methyl-2'-deoxycytidine 3'-phosphorothioate
  modified_base 5: mod_base = OTHER; note = 2'-deoxyadenosine 3'-phosphorothioate
  modified_base 6: mod_base = OTHER; note = 2'-deoxyguanosine 3'-phosphorothioate
  modified_base 7..8: mod_base = OTHER; note = 2'-deoxyadenosine 3'-phosphorothioate
  modified_base 9..10: mod_base = OTHER; note = 5-methyl-2'-deoxycytidine 3'-phosphorothioate
  modified_base 11: mod_base = OTHER; note = 2'-deoxythymidine 3'-phosphorothioate
  modified_base 12: mod_base = OTHER; note = 2'-deoxyadenosine 3'-phosphorothioate
  modified_base 13: mod_base = OTHER; note = 5-methyl-2'-deoxycytidine 3'-phosphorothioate
  modified_base 14..15: mod_base = OTHER; note = cEt adenosine 3'-phosphorothioate
  modified_base 16: mod_base = OTHER; note = cEt adenosine
gtgcagaacctacaaa

SEQ ID NO: 1252 - DNA, 16 bp, synthetic construct
  source 1..16: mol_type = other DNA
  modified_base 1..3: mod_base = OTHER; note = cEt guanosine 3'-phosphorothioate
  modified_base 4: mod_base = OTHER; note = 2'-deoxythymidine 3'-phosphorothioate
  modified_base 5: mod_base = OTHER; note = 2'-deoxyguanosine 3'-phosphorothioate
  modified_base 6: mod_base = OTHER; note = 5-methyl-2'-deoxycytidine 3'-phosphorothioate
  modified_base 7: mod_base = OTHER; note = 2'-deoxyadenosine 3'-phosphorothioate
  modified_base 8: mod_base = OTHER; note = 2'-deoxyguanosine 3'-phosphorothioate
  modified_base 9..10: mod_base = OTHER; note = 2'-deoxyadenosine 3'-phosphorothioate
  modified_base 11..12: mod_base = OTHER; note = 5-methyl-2'-deoxycytidine 3'-phosphorothioate
  modified_base 13: mod_base = OTHER; note = 2'-deoxythymidine 3'-phosphorothioate
  modified_base 14: mod_base = OTHER; note = cEt adenosine 3'-phosphorothioate
  modified_base 15: mod_base = OTHER; note = cEt 5-methylcytidine 3'-phosphorothioate
  modified_base 16: mod_base = OTHER; note = cEt adenosine
gggtgcagaacctaca

SEQ ID NO: 1253 - DNA, 16 bp, synthetic construct
  source 1..16: mol_type = other DNA
  modified_base 1: mod_base = OTHER; note = cEt guanosine 3'-phosphorothioate
  modified_base 2: mod_base = OTHER; note = cEt thymidine 3'-phosphorothioate
  modified_base 3: mod_base = OTHER; note = cEt guanosine 3'-phosphorothioate
  modified_base 4..5: mod_base = OTHER; note = 2'-deoxyguanosine 3'-phosphorothioate
  modified_base 6: mod_base = OTHER; note = 2'-deoxythymidine 3'-phosphorothioate
  modified_base 7: mod_base = OTHER; note = 2'-deoxyguanosine 3'-phosphorothioate
  modified_base 8: mod_base = OTHER; note = 5-methyl-2'-deoxycytidine 3'-phosphorothioate
  modified_base 9: mod_base = OTHER; note = 2'-deoxyadenosine 3'-phosphorothioate
  modified_base 10: mod_base = OTHER; note = 2'-deoxyguanosine 3'-phosphorothioate
  modified_base 11..12: mod_base = OTHER; note = 2'-deoxyadenosine 3'-phosphorothioate
  modified_base 13: mod_base = OTHER; note = 5-methyl-2'-deoxycytidine 3'-phosphorothioate
  modified_base 14: mod_base = OTHER; note = cEt 5-methylcytidine 3'-phosphorothioate
  modified_base 15: mod_base = OTHER; note = cEt thymidine 3'-phosphorothioate
  modified_base 16: mod_base = OTHER; note = cEt adenosine
gtgggtgcagaaccta

SEQ ID NO: 1254 - DNA, 16 bp, synthetic construct
  source 1..16: mol_type = other DNA
  modified_base 1..2: mod_base = OTHER; note = cEt 5-methylcytidine 3'-phosphorothioate
  modified_base 3: mod_base = OTHER; note = cEt adenosine 3'-phosphorothioate
  modified_base 4: mod_base = OTHER; note = 5-methyl-2'-deoxycytidine 3'-phosphorothioate
  modified_base 5: mod_base = OTHER; note = 2'-deoxyadenosine 3'-phosphorothioate
  modified_base 6: mod_base = OTHER; note = 5-methyl-2'-deoxycytidine 3'-phosphorothioate
  modified_base 7..8: mod_base = OTHER; note = 2'-deoxyguanosine 3'-phosphorothioate
  modified_base 9: mod_base = OTHER; note = 5-methyl-2'-deoxycytidine 3'-phosphorothioate
  modified_base 10: mod_base = OTHER; note = 2'-deoxythymidine 3'-phosphorothioate
  modified_base 11: mod_base = OTHER; note = 5-methyl-2'-deoxycytidine 3'-phosphorothioate
  modified_base 12: mod_base = OTHER; note = 2'-deoxyadenosine 3'-phosphorothioate
  modified_base 13: mod_base = OTHER; note = 2'-deoxythymidine 3'-phosphorothioate
  modified_base 14: mod_base = OTHER; note = cEt adenosine 3'-phosphorothioate
  modified_base 15: mod_base = OTHER; note = cEt guanosine 3'-phosphorothioate
  modified_base 16: mod_base = OTHER; note = cEt guanosine
ccacacggctcatagg

SEQ ID NO: 1255 - DNA, 16 bp, synthetic construct
  source 1..16: mol_type = other DNA
  modified_base 1: mod_base = OTHER; note = cEt adenosine 3'-phosphorothioate
  modified_base 2..3: mod_base = OTHER; note = cEt 5-methylcytidine 3'-phosphorothioate
  modified_base 4: mod_base = OTHER; note = 5-methyl-2'-deoxycytidine 3'-phosphorothioate
  modified_base 5: mod_base = OTHER; note = 2'-deoxyadenosine 3'-phosphorothioate
  modified_base 6: mod_base = OTHER; note = 5-methyl-2'-deoxycytidine 3'-phosphorothioate
  modified_base 7: mod_base = OTHER; note = 2'-deoxyadenosine 3'-phosphorothioate
  modified_base 8: mod_base = OTHER; note = 5-methyl-2'-deoxycytidine 3'-phosphorothioate
  modified_base 9..10: mod_base = OTHER; note = 2'-deoxyguanosine 3'-phosphorothioate
  modified_base 11: mod_base = OTHER; note = 5-methyl-2'-deoxycytidine 3'-phosphorothioate
  modified_base 12: mod_base = OTHER; note = 2'-deoxythymidine 3'-phosphorothioate
  modified_base 13: mod_base = OTHER; note = 5-methyl-2'-deoxycytidine 3'-phosphorothioate
  modified_base 14: mod_base = OTHER; note = cEt adenosine 3'-phosphorothioate
  modified_base 15: mod_base = OTHER; note = cEt thymidine 3'-phosphorothioate
  modified_base 16: mod_base = OTHER; note = cEt adenosine
acccacacggctcata

SEQ ID NO: 1256 - DNA, 16 bp, synthetic construct
  source 1..16: mol_type = other DNA
  modified_base 1: mod_base = OTHER; note = cEt thymidine 3'-phosphorothioate
  modified_base 2: mod_base = OTHER; note = cEt guanosine 3'-phosphorothioate
  modified_base 3: mod_base = OTHER; note = cEt adenosine 3'-phosphorothioate
  modified_base 4..6: mod_base = OTHER; note = 5-methyl-2'-deoxycytidine 3'-phosphorothioate
  modified_base 7..9: mod_base = OTHER; note = 2'-deoxyadenosine 3'-phosphorothioate
  modified_base 10: mod_base = OTHER; note = 5-methyl-2'-deoxycytidine 3'-phosphorothioate
  modified_base 11..12: mod_base = OTHER; note = 2'-deoxyguanosine 3'-phosphorothioate
  modified_base 13: mod_base = OTHER; note = 5-methyl-2'-deoxycytidine 3'-phosphorothioate
  modified_base 14: mod_base = OTHER; note = cEt thymidine 3'-phosphorothioate
  modified_base 15: mod_base = OTHER; note = cEt 5-methylcytidine 3'-phosphorothioate
  modified_base 16: mod_base = OTHER; note = cEt adenosine
tgacccacacggctca

SEQ ID NO: 1257 - DNA, 16 bp, synthetic construct
  source 1..16: mol_type = other DNA
  modified_base 1: mod_base = OTHER; note = cEt guanosine 3'-phosphorothioate
  modified_base 2: mod_base = OTHER; note = cEt 5-methylcytidine 3'-phosphorothioate
  modified_base 3: mod_base = OTHER; note = cEt thymidine 3'-phosphorothioate
  modified_base 4: mod_base = OTHER; note = 2'-deoxyguanosine 3'-phosphorothioate
  modified_base 5: mod_base = OTHER; note = 2'-deoxyadenosine 3'-phosphorothioate
  modified_base 6..8: mod_base = OTHER; note = 5-methyl-2'-deoxycytidine 3'-phosphorothioate
  modified_base 9: mod_base = OTHER; note = 2'-deoxyadenosine 3'-phosphorothioate
  modified_base 10: mod_base = OTHER; note = 5-methyl-2'-deoxycytidine 3'-phosphorothioate
  modified_base 11: mod_base = OTHER; note = 2'-deoxyadenosine 3'-phosphorothioate
  modified_base 12: mod_base = OTHER; note = 5-methyl-2'-deoxycytidine 3'-phosphorothioate
  modified_base 13: mod_base = OTHER; note = 2'-deoxyguanosine 3'-phosphorothioate
  modified_base 14: mod_base = OTHER; note = cEt guanosine 3'-phosphorothioate
  modified_base 15: mod_base = OTHER; note = cEt 5-methylcytidine 3'-phosphorothioate
  modified_base 16: mod_base = OTHER; note = cEt thymidine
gctgacccacacggct

SEQ ID NO: 1258 - DNA, 16 bp, synthetic construct
  source 1..16: mol_type = other DNA
  modified_base 1: mod_base = OTHER; note = cEt thymidine 3'-phosphorothioate
  modified_base 2..3: mod_base = OTHER; note = cEt guanosine 3'-phosphorothioate
  modified_base 4: mod_base = OTHER; note = 5-methyl-2'-deoxycytidine 3'-phosphorothioate
  modified_base 5: mod_base = OTHER; note = 2'-deoxythymidine 3'-phosphorothioate
  modified_base 6: mod_base = OTHER; note = 2'-deoxyguanosine 3'-phosphorothioate
  modified_base 7: mod_base = OTHER; note = 2'-deoxyadenosine 3'-phosphorothioate
  modified_base 8..10: mod_base = OTHER; note = 5-methyl-2'-deoxycytidine 3'-phosphorothioate
  modified_base 11: mod_base = OTHER; note = 2'-deoxyadenosine 3'-phosphorothioate
  modified_base 12: mod_base = OTHER; note = 5-methyl-2'-deoxycytidine 3'-phosphorothioate
  modified_base 13: mod_base = OTHER; note = 2'-deoxyadenosine 3'-phosphorothioate
  modified_base 14: mod_base = OTHER; note = cEt 5-methylcytidine 3'-phosphorothioate
  modified_base 15: mod_base = OTHER; note = cEt guanosine 3'-phosphorothioate
  modified_base 16: mod_base = OTHER; note = cEt guanosine
tggctgacccacacgg

SEQ ID NO: 1259 - DNA, 16 bp, synthetic construct
  source 1..16: mol_type = other DNA
  modified_base 1..2: mod_base = OTHER; note = cEt guanosine 3'-phosphorothioate
  modified_base 3: mod_base = OTHER; note = cEt thymidine 3'-phosphorothioate
  modified_base 4..5: mod_base = OTHER; note = 2'-deoxyguanosine 3'-phosphorothioate
  modified_base 6: mod_base = OTHER; note = 5-methyl-2'-deoxycytidine 3'-phosphorothioate
  modified_base 7: mod_base = OTHER; note = 2'-deoxythymidine 3'-phosphorothioate
  modified_base 8: mod_base = OTHER; note = 2'-deoxyguanosine 3'-phosphorothioate
  modified_base 9: mod_base = OTHER; note = 2'-deoxyadenosine 3'-phosphorothioate
  modified_base 10..12: mod_base = OTHER; note = 5-methyl-2'-deoxycytidine 3'-phosphorothioate
  modified_base 13: mod_base = OTHER; note = 2'-deoxyadenosine 3'-phosphorothioate
  modified_base 14: mod_base = OTHER; note = cEt 5-methylcytidine 3'-phosphorothioate
  modified_base 15: mod_base = OTHER; note = cEt adenosine 3'-phosphorothioate
  modified_base 16: mod_base = OTHER; note = cEt 5-methylcytidine
ggtggctgacccacac

SEQ ID NO: 1260 - DNA, 16 bp, synthetic construct
  source 1..16: mol_type = other DNA
  modified_base 1: mod_base = OTHER; note = cEt adenosine 3'-phosphorothioate
  modified_base 2: mod_base = OTHER; note = cEt thymidine 3'-phosphorothioate
  modified_base 3: mod_base = OTHER; note = cEt guanosine 3'-phosphorothioate
  modified_base 4: mod_base = OTHER; note = 2'-deoxyguanosine 3'-phosphorothioate
  modified_base 5: mod_base = OTHER; note = 2'-deoxythymidine 3'-phosphorothioate
  modified_base 6..7: mod_base = OTHER; note = 2'-deoxyguanosine 3'-phosphorothioate
  modified_base 8: mod_base = OTHER; note = 5-methyl-2'-deoxycytidine 3'-phosphorothioate
  modified_base 9: mod_base = OTHER; note = 2'-deoxythymidine 3'-phosphorothioate
  modified_base 10: mod_base = OTHER; note = 2'-deoxyguanosine 3'-phosphorothioate
  modified_base 11: mod_base = OTHER; note = 2'-deoxyadenosine 3'-phosphorothioate
  modified_base 12..13: mod_base = OTHER; note = 5-methyl-2'-deoxycytidine 3'-phosphorothioate
  modified_base 14: mod_base = OTHER; note = cEt 5-methylcytidine 3'-phosphorothioate
  modified_base 15: mod_base = OTHER; note = cEt adenosine 3'-phosphorothioate
  modified_base 16: mod_base = OTHER; note = cEt 5-methylcytidine
atggtggctgacccac

SEQ ID NO: 1261 - DNA, 16 bp, synthetic construct
  source 1..16: mol_type = other DNA
  modified_base 1: mod_base = OTHER; note = cEt guanosine 3'-phosphorothioate
  modified_base 2..3: mod_base = OTHER; note = cEt adenosine 3'-phosphorothioate
  modified_base 4: mod_base = OTHER; note = 2'-deoxythymidine 3'-phosphorothioate
  modified_base 5..6: mod_base = OTHER; note = 2'-deoxyguanosine 3'-phosphorothioate
  modified_base 7: mod_base = OTHER; note = 2'-deoxythymidine 3'-phosphorothioate
  modified_base 8..9: mod_base = OTHER; note = 2'-deoxyguanosine 3'-phosphorothioate
  modified_base 10: mod_base = OTHER; note = 5-methyl-2'-deoxycytidine 3'-phosphorothioate
  modified_base 11: mod_base = OTHER; note = 2'-deoxythymidine 3'-phosphorothioate
  modified_base 12: mod_base = OTHER; note = 2'-deoxyguanosine 3'-phosphorothioate
  modified_base 13: mod_base = OTHER; note = 2'-deoxyadenosine 3'-phosphorothioate
  modified_base 14..15: mod_base = OTHER; note = cEt 5-methylcytidine 3'-phosphorothioate
  modified_base 16: mod_base = OTHER; note = cEt 5-methylcytidine
gaatggtggctgaccc

SEQ ID NO: 1262 - DNA, 16 bp, synthetic construct
  source 1..16: mol_type = other DNA
  modified_base 1: mod_base = OTHER; note = cEt 5-methylcytidine 3'-phosphorothioate
  modified_base 2: mod_base = OTHER; note = cEt thymidine 3'-phosphorothioate
  modified_base 3: mod_base = OTHER; note = cEt adenosine 3'-phosphorothioate
  modified_base 4..5: mod_base = OTHER; note = 2'-deoxyadenosine 3'-phosphorothioate
  modified_base 6..7: mod_base = OTHER; note = 2'-deoxyguanosine 3'-phosphorothioate
  modified_base 8: mod_base = OTHER; note = 2'-deoxyadenosine 3'-phosphorothioate
  modified_base 9: mod_base = OTHER; note = 5-methyl-2'-deoxycytidine 3'-phosphorothioate
  modified_base 10: mod_base = OTHER; note = 2'-deoxyguanosine 3'-phosphorothioate
  modified_base 11: mod_base = OTHER; note = 5-methyl-2'-deoxycytidine 3'-phosphorothioate
  modified_base 12: mod_base = OTHER; note = 2'-deoxyadenosine 3'-phosphorothioate
  modified_base 13: mod_base = OTHER; note = 2'-deoxyguanosine 3'-phosphorothioate
  modified_base 14..15: mod_base = OTHER; note = cEt guanosine 3'-phosphorothioate
  modified_base 16: mod_base = OTHER; note = cEt adenosine
ctaaaggacgcaggga

SEQ ID NO: 1263 - DNA, 16 bp, synthetic construct
  source 1..16: mol_type = other DNA
  modified_base 1..2: mod_base = OTHER; note = cEt adenosine 3'-phosphorothioate
  modified_base 3: mod_base = OTHER; note = cEt 5-methylcytidine 3'-phosphorothioate
  modified_base 4: mod_base = OTHER; note = 2'-deoxythymidine 3'-phosphorothioate
  modified_base 5..7: mod_base = OTHER; note = 2'-deoxyadenosine 3'-phosphorothioate
  modified_base 8..9: mod_base = OTHER; note = 2'-deoxyguanosine 3'-phosphorothioate
  modified_base 10: mod_base = OTHER; note = 2'-deoxyadenosine 3'-phosphorothioate
  modified_base 11: mod_base = OTHER; note = 5-methyl-2'-deoxycytidine 3'-phosphorothioate
  modified_base 12: mod_base = OTHER; note = 2'-deoxyguanosine 3'-phosphorothioate
  modified_base 13: mod_base = OTHER; note = 5-methyl-2'-deoxycytidine 3'-phosphorothioate
  modified_base 14: mod_base = OTHER; note = cEt adenosine 3'-phosphorothioate
  modified_base 15: mod_base = OTHER; note = cEt guanosine 3'-phosphorothioate
  modified_base 16: mod_base = OTHER; note = cEt guanosine
aactaaaggacgcagg

SEQ ID NO: 1264 - DNA, 16 bp, synthetic construct
  source 1..16: mol_type = other DNA
  modified_base 1: mod_base = OTHER; note = cEt guanosine 3'-phosphorothioate
  modified_base 3: mod_base = OTHER; note = cEt guanosine 3'-phosphorothioate
  modified_base 2: mod_base = OTHER; note = cEt adenosine 3'-phosphorothioate
  modified_base 4..5: mod_base = OTHER; note = 2'-deoxyadenosine 3'-phosphorothioate
  modified_base 6: mod_base = OTHER; note = 5-methyl-2'-deoxycytidine 3'-phosphorothioate
  modified_base 7: mod_base = OTHER; note = 2'-deoxythymidine 3'-phosphorothioate
  modified_base 8..10: mod_base = OTHER; note = 2'-deoxyadenosine 3'-phosphorothioate
  modified_base 11..12: mod_base = OTHER; note = 2'-deoxyguanosine 3'-phosphorothioate
  modified_base 13: mod_base = OTHER; note = 2'-deoxyadenosine 3'-phosphorothioate
  modified_base 14: mod_base = OTHER; note = cEt 5-methylcytidine 3'-phosphorothioate
  modified_base 15: mod_base = OTHER; note = cEt guanosine 3'-phosphorothioate
  modified_base 16: mod_base = OTHER; note = cEt 5-methylcytidine
gagaactaaaggacgc

SEQ ID NO: 1265 - DNA, 16 bp, synthetic construct
  source 1..16: mol_type = other DNA
  modified_base 1: mod_base = OTHER; note = cEt adenosine 3'-phosphorothioate
  modified_base 2..3: mod_base = OTHER; note = cEt thymidine 3'-phosphorothioate
  modified_base 4..5: mod_base = OTHER; note = 2'-deoxyguanosine 3'-phosphorothioate
  modified_base 6: mod_base = OTHER; note = 2'-deoxythymidine 3'-phosphorothioate
  modified_base 7..9: mod_base = OTHER; note = 5-methyl-2'-deoxycytidine 3'-phosphorothioate
  modified_base 10..11: mod_base = OTHER; note = 2'-deoxyadenosine 3'-phosphorothioate
  modified_base 12: mod_base = OTHER; note = 2'-deoxyguanosine 3'-phosphorothioate
  modified_base 13: mod_base = OTHER; note = 5-methyl-2'-deoxycytidine 3'-phosphorothioate
  modified_base 14..15: mod_base = OTHER; note = cEt 5-methylcytidine 3'-phosphorothioate
  modified_base 16: mod_base = OTHER; note = cEt 5-methylcytidine
attggtcccaagcccc

SEQ ID NO: 1266 - DNA, 16 bp, synthetic construct
  source 1..16: mol_type = other DNA
  modified_base 1..2: mod_base = OTHER; note = cEt 5-methylcytidine 3'-phosphorothioate
  modified_base 3: mod_base = OTHER; note = cEt adenosine 3'-phosphorothioate
  modified_base 4..5: mod_base = OTHER; note = 2'-deoxythymidine 3'-phosphorothioate
  modified_base 6..7: mod_base = OTHER; note = 2'-deoxyguanosine 3'-phosphorothioate
  modified_base 8: mod_base = OTHER; note = 2'-deoxythymidine 3'-phosphorothioate
  modified_base 9..11: mod_base = OTHER; note = 5-methyl-2'-deoxycytidine 3'-phosphorothioate
  modified_base 12..13: mod_base = OTHER; note = 2'-deoxyadenosine 3'-phosphorothioate
  modified_base 14: mod_base = OTHER; note = cEt guanosine 3'-phosphorothioate
  modified_base 15: mod_base = OTHER; note = cEt 5-methylcytidine 3'-phosphorothioate
  modified_base 16: mod_base = OTHER; note = cEt 5-methylcytidine
ccattggtcccaagcc

SEQ ID NO: 1267 - DNA, 16 bp, synthetic construct
  source 1..16: mol_type = other DNA
  modified_base 1: mod_base = OTHER; note = cEt guanosine 3'-phosphorothioate
  modified_base 2..3: mod_base = OTHER; note = cEt 5-methylcytidine 3'-phosphorothioate
  modified_base 4: mod_base = OTHER; note = 5-methyl-2'-deoxycytidine 3'-phosphorothioate
  modified_base 5: mod_base = OTHER; note = 2'-deoxyadenosine 3'-phosphorothioate
  modified_base 6..7: mod_base = OTHER; note = 2'-deoxythymidine 3'-phosphorothioate
  modified_base 8..9: mod_base = OTHER; note = 2'-deoxyguanosine 3'-phosphorothioate
  modified_base 10: mod_base = OTHER; note = 2'-deoxythymidine 3'-phosphorothioate
  modified_base 11..13: mod_base = OTHER; note = 5-methyl-2'-deoxycytidine 3'-phosphorothioate
  modified_base 14..15: mod_base = OTHER; note = cEt adenosine 3'-phosphorothioate
  modified_base 16: mod_base = OTHER; note = cEt guanosine
gcccattggtcccaag

SEQ ID NO: 1268 - DNA, 16 bp, synthetic construct
  source 1..16: mol_type = other DNA
  modified_base 1: mod_base = OTHER; note = cEt adenosine 3'-phosphorothioate
  modified_base 2: mod_base = OTHER; note = cEt 5-methylcytidine 3'-phosphorothioate
  modified_base 3: mod_base = OTHER; note = cEt guanosine 3'-phosphorothioate
  modified_base 4..6: mod_base = OTHER; note = 5-methyl-2'-deoxycytidine 3'-phosphorothioate
  modified_base 7: mod_base = OTHER; note = 2'-deoxyadenosine 3'-phosphorothioate
  modified_base 8..9: mod_base = OTHER; note = 2'-deoxythymidine 3'-phosphorothioate
  modified_base 10..11: mod_base = OTHER; note = 2'-deoxyguanosine 3'-phosphorothioate
  modified_base 12: mod_base = OTHER; note = 2'-deoxythymidine 3'-phosphorothioate
  modified_base 13: mod_base = OTHER; note = 5-methyl-2'-deoxycytidine 3'-phosphorothioate
  modified_base 14..15: mod_base = OTHER; note = cEt 5-methylcytidine 3'-phosphorothioate
  modified_base 16: mod_base = OTHER; note = cEt adenosine
acgcccattggtccca

SEQ ID NO: 1269 - DNA, 16 bp, synthetic construct
  source 1..16: mol_type = other DNA
  modified_base 1..2: mod_base = OTHER; note = cEt 5-methylcytidine 3'-phosphorothioate
  modified_base 3: mod_base = OTHER; note = cEt adenosine 3'-phosphorothioate
  modified_base 4: mod_base = OTHER; note = 5-methyl-2'-deoxycytidine 3'-phosphorothioate
  modified_base 5: mod_base = OTHER; note = 2'-deoxyguanosine 3'-phosphorothioate
  modified_base 6..8: mod_base = OTHER; note = 5-methyl-2'-deoxycytidine 3'-phosphorothioate
  modified_base 9: mod_base = OTHER; note = 2'-deoxyadenosine 3'-phosphorothioate
  modified_base 10..11: mod_base = OTHER; note = 2'-deoxythymidine 3'-phosphorothioate
  modified_base 12..13: mod_base = OTHER; note = 2'-deoxyguanosine 3'-phosphorothioate
  modified_base 14: mod_base = OTHER; note = cEt thymidine 3'-phosphorothioate
  modified_base 15: mod_base = OTHER; note = cEt 5-methylcytidine 3'-phosphorothioate
  modified_base 16: mod_base = OTHER; note = cEt 5-methylcytidine
ccacgcccattggtcc

SEQ ID NO: 1270 - DNA, 16 bp, synthetic construct
  source 1..16: mol_type = other DNA
  modified_base 1: mod_base = OTHER; note = cEt 5-methylcytidine 3'-phosphorothioate
  modified_base 3: mod_base = OTHER; note = cEt 5-methylcytidine 3'-phosphorothioate
  modified_base 2: mod_base = OTHER; note = cEt adenosine 3'-phosphorothioate
  modified_base 4: mod_base = OTHER; note = 5-methyl-2'-deoxycytidine 3'-phosphorothioate
  modified_base 5: mod_base = OTHER; note = 2'-deoxyadenosine 3'-phosphorothioate
  modified_base 6: mod_base = OTHER; note = 5-methyl-2'-deoxycytidine 3'-phosphorothioate
  modified_base 7: mod_base = OTHER; note = 2'-deoxyguanosine 3'-phosphorothioate
  modified_base 8..10: mod_base = OTHER; note = 5-methyl-2'-deoxycytidine 3'-phosphorothioate
  modified_base 11: mod_base = OTHER; note = 2'-deoxyadenosine 3'-phosphorothioate
  modified_base 12..13: mod_base = OTHER; note = 2'-deoxythymidine 3'-phosphorothioate
  modified_base 14..15: mod_base = OTHER; note = cEt guanosine 3'-phosphorothioate
  modified_base 16: mod_base = OTHER; note = cEt thymidine
caccacgcccattggt

SEQ ID NO: 1271 - DNA, 16 bp, synthetic construct
  source 1..16: mol_type = other DNA
  modified_base 1: mod_base = OTHER; note = cEt adenosine 3'-phosphorothioate
  modified_base 3: mod_base = OTHER; note = cEt adenosine 3'-phosphorothioate
  modified_base 2: mod_base = OTHER; note = cEt guanosine 3'-phosphorothioate
  modified_base 4..6: mod_base = OTHER; note = 5-methyl-2'-deoxycytidine 3'-phosphorothioate
  modified_base 7..8: mod_base = OTHER; note = 2'-deoxyadenosine 3'-phosphorothioate
  modified_base 9: mod_base = OTHER; note = 5-methyl-2'-deoxycytidine 3'-phosphorothioate
  modified_base 10: mod_base = OTHER; note = 2'-deoxythymidine 3'-phosphorothioate
  modified_base 11..12: mod_base = OTHER; note = 5-methyl-2'-deoxycytidine 3'-phosphorothioate
  modified_base 13: mod_base = OTHER; note = 2'-deoxyadenosine 3'-phosphorothioate
  modified_base 14..15: mod_base = OTHER; note = cEt 5-methylcytidine 3'-phosphorothioate
  modified_base 16: mod_base = OTHER; note = cEt 5-methylcytidine
agacccaactccaccc

SEQ ID NO: 1272 - DNA, 16 bp, synthetic construct
  source 1..16: mol_type = other DNA
  modified_base 1: mod_base = OTHER; note = cEt thymidine 3'-phosphorothioate
  modified_base 2: mod_base = OTHER; note = cEt 5-methylcytidine 3'-phosphorothioate
  modified_base 3: mod_base = OTHER; note = cEt adenosine 3'-phosphorothioate
  modified_base 4..5: mod_base = OTHER; note = 5-methyl-2'-deoxycytidine 3'-phosphorothioate
  modified_base 6: mod_base = OTHER; note = 2'-deoxythymidine 3'-phosphorothioate
  modified_base 7: mod_base = OTHER; note = 5-methyl-2'-deoxycytidine 3'-phosphorothioate
  modified_base 8: mod_base = OTHER; note = 2'-deoxyguanosine 3'-phosphorothioate
  modified_base 9..12: mod_base = OTHER; note = 5-methyl-2'-deoxycytidine 3'-phosphorothioate
  modified_base 13: mod_base = OTHER; note = 2'-deoxythymidine 3'-phosphorothioate
  modified_base 14: mod_base = OTHER; note = cEt 5-methylcytidine 3'-phosphorothioate
  modified_base 15: mod_base = OTHER; note = cEt thymidine 3'-phosphorothioate
  modified_base 16: mod_base = OTHER; note = cEt thymidine
tcacctcgcccctctt

SEQ ID NO: 1273 - DNA, 16 bp, synthetic construct
  source 1..16: mol_type = other DNA
  modified_base 1..2: mod_base = OTHER; note = cEt 5-methylcytidine 3'-phosphorothioate
  modified_base 3: mod_base = OTHER; note = cEt thymidine 3'-phosphorothioate
  modified_base 4: mod_base = OTHER; note = 5-methyl-2'-deoxycytidine 3'-phosphorothioate
  modified_base 5: mod_base = OTHER; note = 2'-deoxyadenosine 3'-phosphorothioate
  modified_base 6..7: mod_base = OTHER; note = 5-methyl-2'-deoxycytidine 3'-phosphorothioate
  modified_base 8: mod_base = OTHER; note = 2'-deoxythymidine 3'-phosphorothioate
  modified_base 9: mod_base = OTHER; note = 5-methyl-2'-deoxycytidine 3'-phosphorothioate
  modified_base 10: mod_base = OTHER; note = 2'-deoxyguanosine 3'-phosphorothioate
  modified_base 11..13: mod_base = OTHER; note = 5-methyl-2'-deoxycytidine 3'-phosphorothioate
  modified_base 14: mod_base = OTHER; note = cEt 5-methylcytidine 3'-phosphorothioate
  modified_base 15: mod_base = OTHER; note = cEt thymidine 3'-phosphorothioate
  modified_base 16: mod_base = OTHER; note = cEt 5-methylcytidine
cctcacctcgcccctc

SEQ ID NO: 1274 - DNA, 16 bp, synthetic construct
  source 1..16: mol_type = other DNA
  modified_base 1: mod_base = OTHER; note = cEt adenosine 3'-phosphorothioate
  modified_base 2: mod_base = OTHER; note = cEt guanosine 3'-phosphorothioate
  modified_base 3: mod_base = OTHER; note = cEt 5-methylcytidine 3'-phosphorothioate
  modified_base 4..6: mod_base = OTHER; note = 5-methyl-2'-deoxycytidine 3'-phosphorothioate
  modified_base 7: mod_base = OTHER; note = 2'-deoxythymidine 3'-phosphorothioate
  modified_base 8: mod_base = OTHER; note = 5-methyl-2'-deoxycytidine 3'-phosphorothioate
  modified_base 9: mod_base = OTHER; note = 2'-deoxyadenosine 3'-phosphorothioate
  modified_base 10..11: mod_base = OTHER; note = 5-methyl-2'-deoxycytidine 3'-phosphorothioate
  modified_base 12: mod_base = OTHER; note = 2'-deoxythymidine 3'-phosphorothioate
  modified_base 13: mod_base = OTHER; note = 5-methyl-2'-deoxycytidine 3'-phosphorothioate
  modified_base 14: mod_base = OTHER; note = cEt guanosine 3'-phosphorothioate
  modified_base 15: mod_base = OTHER; note = cEt 5-methylcytidine 3'-phosphorothioate
  modified_base 16: mod_base = OTHER; note = cEt 5-methylcytidine
agcccctcacctcgcc

SEQ ID NO: 1275 - DNA, 16 bp, synthetic construct
  source 1..16: mol_type = other DNA
  modified_base 1: mod_base = OTHER; note = cEt 5-methylcytidine 3'-phosphorothioate
  modified_base 3: mod_base = OTHER; note = cEt 5-methylcytidine 3'-phosphorothioate
  modified_base 2: mod_base = OTHER; note = cEt thymidine 3'-phosphorothioate
  modified_base 4..6: mod_base = OTHER; note = 2'-deoxyadenosine 3'-phosphorothioate
  modified_base 7: mod_base = OTHER; note = 2'-deoxyguanosine 3'-phosphorothioate
  modified_base 8..13: mod_base = OTHER; note = 5-methyl-2'-deoxycytidine 3'-phosphorothioate
  modified_base 14: mod_base = OTHER; note = cEt adenosine 3'-phosphorothioate
  modified_base 15: mod_base = OTHER; note = cEt 5-methylcytidine 3'-phosphorothioate
  modified_base 16: mod_base = OTHER; note = cEt guanosine
ctcaaagccccccacg

SEQ ID NO: 1276 - DNA, 16 bp, synthetic construct
  source 1..16: mol_type = other DNA
  modified_base 1: mod_base = OTHER; note = cEt adenosine 3'-phosphorothioate
  modified_base 2: mod_base = OTHER; note = cEt thymidine 3'-phosphorothioate
  modified_base 3: mod_base = OTHER; note = cEt 5-methylcytidine 3'-phosphorothioate
  modified_base 4: mod_base = OTHER; note = 5-methyl-2'-deoxycytidine 3'-phosphorothioate
  modified_base 6: mod_base = OTHER; note = 5-methyl-2'-deoxycytidine 3'-phosphorothioate
  modified_base 5: mod_base = OTHER; note = 2'-deoxythymidine 3'-phosphorothioate
  modified_base 7..9: mod_base = OTHER; note = 2'-deoxyadenosine 3'-phosphorothioate
  modified_base 10: mod_base = OTHER; note = 2'-deoxyguanosine 3'-phosphorothioate
  modified_base 11..13: mod_base = OTHER; note = 5-methyl-2'-deoxycytidine 3'-phosphorothioate
  modified_base 14..15: mod_base = OTHER; note = cEt 5-methylcytidine 3'-phosphorothioate
  modified_base 16: mod_base = OTHER; note = cEt 5-methylcytidine
atcctcaaagcccccc

SEQ ID NO: 1277 - DNA, 16 bp, synthetic construct
  source 1..16: mol_type = other DNA
  modified_base 1..2: mod_base = OTHER; note = cEt guanosine 3'-phosphorothioate
  modified_base 3: mod_base = OTHER; note = cEt adenosine 3'-phosphorothioate
  modified_base 4: mod_base = OTHER; note = 2'-deoxythymidine 3'-phosphorothioate
  modified_base 5..6: mod_base = OTHER; note = 5-methyl-2'-deoxycytidine 3'-phosphorothioate
  modified_base 7: mod_base = OTHER; note = 2'-deoxythymidine 3'-phosphorothioate
  modified_base 8: mod_base = OTHER; note = 5-methyl-2'-deoxycytidine 3'-phosphorothioate
  modified_base 9..11: mod_base = OTHER; note = 2'-deoxyadenosine 3'-phosphorothioate
  modified_base 12: mod_base = OTHER; note = 2'-deoxyguanosine 3'-phosphorothioate
  modified_base 13: mod_base = OTHER; note = 5-methyl-2'-deoxycytidine 3'-phosphorothioate
  modified_base 14..15: mod_base = OTHER; note = cEt 5-methylcytidine 3'-phosphorothioate
  modified_base 16: mod_base = OTHER; note = cEt 5-methylcytidine
ggatcctcaaagcccc

SEQ ID NO: 1278 - DNA, 16 bp, synthetic construct
  source 1..16: mol_type = other DNA
  modified_base 1: mod_base = OTHER; note = cEt guanosine 3'-phosphorothioate
  modified_base 3: mod_base = OTHER; note = cEt guanosine 3'-phosphorothioate
  modified_base 2: mod_base = OTHER; note = cEt 5-methylcytidine 3'-phosphorothioate
  modified_base 4: mod_base = OTHER; note = 2'-deoxyguanosine 3'-phosphorothioate
  modified_base 5: mod_base = OTHER; note = 2'-deoxyadenosine 3'-phosphorothioate
  modified_base 6: mod_base = OTHER; note = 2'-deoxythymidine 3'-phosphorothioate
  modified_base 7..8: mod_base = OTHER; note = 5-methyl-2'-deoxycytidine 3'-phosphorothioate
  modified_base 9: mod_base = OTHER; note = 2'-deoxythymidine 3'-phosphorothioate
  modified_base 10: mod_base = OTHER; note = 5-methyl-2'-deoxycytidine 3'-phosphorothioate
  modified_base 11..13: mod_base = OTHER; note = 2'-deoxyadenosine 3'-phosphorothioate
  modified_base 14: mod_base = OTHER; note = cEt guanosine 3'-phosphorothioate
  modified_base 15: mod_base = OTHER; note = cEt 5-methylcytidine 3'-phosphorothioate
  modified_base 16: mod_base = OTHER; note = cEt 5-methylcytidine
gcggatcctcaaagcc

SEQ ID NO: 1279 - DNA, 16 bp, synthetic construct
  source 1..16: mol_type = other DNA
  modified_base 1: mod_base = OTHER; note = cEt guanosine 3'-phosphorothioate
  modified_base 3: mod_base = OTHER; note = cEt guanosine 3'-phosphorothioate
  modified_base 2: mod_base = OTHER; note = cEt 5-methylcytidine 3'-phosphorothioate
  modified_base 4: mod_base = OTHER; note = 5-methyl-2'-deoxycytidine 3'-phosphorothioate
  modified_base 5..6: mod_base = OTHER; note = 2'-deoxyguanosine 3'-phosphorothioate
  modified_base 7: mod_base = OTHER; note = 2'-deoxyadenosine 3'-phosphorothioate
  modified_base 8: mod_base = OTHER; note = 2'-deoxythymidine 3'-phosphorothioate
  modified_base 9..10: mod_base = OTHER; note = 5-methyl-2'-deoxycytidine 3'-phosphorothioate
  modified_base 11: mod_base = OTHER; note = 2'-deoxythymidine 3'-phosphorothioate
  modified_base 12: mod_base = OTHER; note = 5-methyl-2'-deoxycytidine 3'-phosphorothioate
  modified_base 13: mod_base = OTHER; note = 2'-deoxyadenosine 3'-phosphorothioate
  modified_base 14..15: mod_base = OTHER; note = cEt adenosine 3'-phosphorothioate
  modified_base 16: mod_base = OTHER; note = cEt guanosine
gcgcggatcctcaaag

SEQ ID NO: 1280 - DNA, 16 bp, synthetic construct
  source 1..16: mol_type = other DNA
  modified_base 1..3: mod_base = OTHER; note = cEt guanosine 3'-phosphorothioate
  modified_base 4: mod_base = OTHER; note = 5-methyl-2'-deoxycytidine 3'-phosphorothioate
  modified_base 5: mod_base = OTHER; note = 2'-deoxyguanosine 3'-phosphorothioate
  modified_base 6: mod_base = OTHER; note = 5-methyl-2'-deoxycytidine 3'-phosphorothioate
  modified_base 7..8: mod_base = OTHER; note = 2'-deoxyguanosine 3'-phosphorothioate
  modified_base 9: mod_base = OTHER; note = 2'-deoxyadenosine 3'-phosphorothioate
  modified_base 10: mod_base = OTHER; note = 2'-deoxythymidine 3'-phosphorothioate
  modified_base 11..12: mod_base = OTHER; note = 5-methyl-2'-deoxycytidine 3'-phosphorothioate
  modified_base 13: mod_base = OTHER; note = 2'-deoxythymidine 3'-phosphorothioate
  modified_base 14: mod_base = OTHER; note = cEt 5-methylcytidine 3'-phosphorothioate
  modified_base 15: mod_base = OTHER; note = cEt adenosine 3'-phosphorothioate
  modified_base 16: mod_base = OTHER; note = cEt adenosine
gggcgcggatcctcaa

SEQ ID NO: 1281 - DNA, 16 bp, synthetic construct
  source 1..16: mol_type = other DNA
  modified_base 1: mod_base = OTHER; note = cEt guanosine 3'-phosphorothioate
  modified_base 3: mod_base = OTHER; note = cEt guanosine 3'-phosphorothioate
  modified_base 2: mod_base = OTHER; note = cEt adenosine 3'-phosphorothioate
  modified_base 4: mod_base = OTHER; note = 5-methyl-2'-deoxycytidine 3'-phosphorothioate
  modified_base 5: mod_base = OTHER; note = 2'-deoxythymidine 3'-phosphorothioate
  modified_base 6: mod_base = OTHER; note = 2'-deoxyguanosine 3'-phosphorothioate
  modified_base 7: mod_base = OTHER; note = 5-methyl-2'-deoxycytidine 3'-phosphorothioate
  modified_base 8: mod_base = OTHER; note = 2'-deoxyadenosine 3'-phosphorothioate
  modified_base 9: mod_base = OTHER; note = 2'-deoxyguanosine 3'-phosphorothioate
  modified_base 10..11: mod_base = OTHER; note = 5-methyl-2'-deoxycytidine 3'-phosphorothioate
  modified_base 12..13: mod_base = OTHER; note = 2'-deoxyguanosine 3'-phosphorothioate
  modified_base 14: mod_base = OTHER; note = cEt adenosine 3'-phosphorothioate
  modified_base 15: mod_base = OTHER; note = cEt guanosine 3'-phosphorothioate
  modified_base 16: mod_base = OTHER; note = cEt adenosine
gagctgcagccggaga

SEQ ID NO: 1282 - DNA, 16 bp, synthetic construct
  source 1..16: mol_type = other DNA
  modified_base 1: mod_base = OTHER; note = cEt adenosine 3'-phosphorothioate
  modified_base 2..3: mod_base = OTHER; note = cEt guanosine 3'-phosphorothioate
  modified_base 4: mod_base = OTHER; note = 2'-deoxyadenosine 3'-phosphorothioate
  modified_base 5: mod_base = OTHER; note = 2'-deoxyguanosine 3'-phosphorothioate
  modified_base 6: mod_base = OTHER; note = 5-methyl-2'-deoxycytidine 3'-phosphorothioate
  modified_base 7: mod_base = OTHER; note = 2'-deoxythymidine 3'-phosphorothioate
  modified_base 8: mod_base = OTHER; note = 2'-deoxyguanosine 3'-phosphorothioate
  modified_base 9: mod_base = OTHER; note = 5-methyl-2'-deoxycytidine 3'-phosphorothioate
  modified_base 10: mod_base = OTHER; note = 2'-deoxyadenosine 3'-phosphorothioate
  modified_base 11: mod_base = OTHER; note = 2'-deoxyguanosine 3'-phosphorothioate
  modified_base 12..13: mod_base = OTHER; note = 5-methyl-2'-deoxycytidine 3'-phosphorothioate
  modified_base 14..15: mod_base = OTHER; note = cEt guanosine 3'-phosphorothioate
  modified_base 16: mod_base = OTHER; note = cEt adenosine
aggagctgcagccgga

SEQ ID NO: 1283 - DNA, 16 bp, synthetic construct
  source 1..16: mol_type = other DNA
  modified_base 1: mod_base = OTHER; note = cEt 5-methylcytidine 3'-phosphorothioate
  modified_base 2..3: mod_base = OTHER; note = cEt guanosine 3'-phosphorothioate
  modified_base 4: mod_base = OTHER; note = 2'-deoxyadenosine 3'-phosphorothioate
  modified_base 5..6: mod_base = OTHER; note = 2'-deoxyguanosine 3'-phosphorothioate
  modified_base 7: mod_base = OTHER; note = 2'-deoxyadenosine 3'-phosphorothioate
  modified_base 8: mod_base = OTHER; note = 2'-deoxyguanosine 3'-phosphorothioate
  modified_base 9: mod_base = OTHER; note = 5-methyl-2'-deoxycytidine 3'-phosphorothioate
  modified_base 10: mod_base = OTHER; note = 2'-deoxythymidine 3'-phosphorothioate
  modified_base 11: mod_base = OTHER; note = 2'-deoxyguanosine 3'-phosphorothioate
  modified_base 12: mod_base = OTHER; note = 5-methyl-2'-deoxycytidine 3'-phosphorothioate
  modified_base 13: mod_base = OTHER; note = 2'-deoxyadenosine 3'-phosphorothioate
  modified_base 14: mod_base = OTHER; note = cEt guanosine 3'-phosphorothioate
  modified_base 15: mod_base = OTHER; note = cEt 5-methylcytidine 3'-phosphorothioate
  modified_base 16: mod_base = OTHER; note = cEt 5-methylcytidine
cggaggagctgcagcc

SEQ ID NO: 1284 - DNA, 16 bp, synthetic construct
  source 1..16: mol_type = other DNA
  modified_base 1: mod_base = OTHER; note = cEt adenosine 3'-phosphorothioate
  modified_base 2..3: mod_base = OTHER; note = cEt 5-methylcytidine 3'-phosphorothioate
  modified_base 4: mod_base = OTHER; note = 5-methyl-2'-deoxycytidine 3'-phosphorothioate
  modified_base 5..6: mod_base = OTHER; note = 2'-deoxyguanosine 3'-phosphorothioate
  modified_base 7: mod_base = OTHER; note = 2'-deoxyadenosine 3'-phosphorothioate
  modified_base 8..9: mod_base = OTHER; note = 2'-deoxyguanosine 3'-phosphorothioate
  modified_base 10: mod_base = OTHER; note = 2'-deoxyadenosine 3'-phosphorothioate
  modified_base 11: mod_base = OTHER; note = 2'-deoxyguanosine 3'-phosphorothioate
  modified_base 12: mod_base = OTHER; note = 5-methyl-2'-deoxycytidine 3'-phosphorothioate
  modified_base 13: mod_base = OTHER; note = 2'-deoxythymidine 3'-phosphorothioate
  modified_base 14: mod_base = OTHER; note = cEt guanosine 3'-phosphorothioate
  modified_base 15: mod_base = OTHER; note = cEt 5-methylcytidine 3'-phosphorothioate
  modified_base 16: mod_base = OTHER; note = cEt adenosine
acccggaggagctgca

SEQ ID NO: 1285 - DNA, 16 bp, synthetic construct
  source 1..16: mol_type = other DNA
  modified_base 1: mod_base = OTHER; note = cEt guanosine 3'-phosphorothioate
  modified_base 2: mod_base = OTHER; note = cEt 5-methylcytidine 3'-phosphorothioate
  modified_base 3: mod_base = OTHER; note = cEt adenosine 3'-phosphorothioate
  modified_base 4..6: mod_base = OTHER; note = 5-methyl-2'-deoxycytidine 3'-phosphorothioate
  modified_base 7..8: mod_base = OTHER; note = 2'-deoxyguanosine 3'-phosphorothioate
  modified_base 9: mod_base = OTHER; note = 2'-deoxyadenosine 3'-phosphorothioate
  modified_base 10..11: mod_base = OTHER; note = 2'-deoxyguanosine 3'-phosphorothioate
  modified_base 12: mod_base = OTHER; note = 2'-deoxyadenosine 3'-phosphorothioate
  modified_base 13: mod_base = OTHER; note = 2'-deoxyguanosine 3'-phosphorothioate
  modified_base 14: mod_base = OTHER; note = cEt 5-methylcytidine 3'-phosphorothioate
  modified_base 15: mod_base = OTHER; note = cEt thymidine 3'-phosphorothioate
  modified_base 16: mod_base = OTHER; note = cEt guanosine
gcacccggaggagctg

SEQ ID NO: 1286 - DNA, 16 bp, synthetic construct
  source 1..16: mol_type = other DNA
  modified_base 1..3: mod_base = OTHER; note = cEt guanosine 3'-phosphorothioate
  modified_base 4: mod_base = OTHER; note = 5-methyl-2'-deoxycytidine 3'-phosphorothioate
  modified_base 5: mod_base = OTHER; note = 2'-deoxyadenosine 3'-phosphorothioate
  modified_base 6..8: mod_base = OTHER; note = 5-methyl-2'-deoxycytidine 3'-phosphorothioate
  modified_base 9..10: mod_base = OTHER; note = 2'-deoxyguanosine 3'-phosphorothioate
  modified_base 11: mod_base = OTHER; note = 2'-deoxyadenosine 3'-phosphorothioate
  modified_base 12..13: mod_base = OTHER; note = 2'-deoxyguanosine 3'-phosphorothioate
  modified_base 14: mod_base = OTHER; note = cEt adenosine 3'-phosphorothioate
  modified_base 15: mod_base = OTHER; note = cEt guanosine 3'-phosphorothioate
  modified_base 16: mod_base = OTHER; note = cEt 5-methylcytidine
gggcacccggaggagc

SEQ ID NO: 1287 - DNA, 16 bp, synthetic construct
  source 1..16: mol_type = other DNA
  modified_base 1: mod_base = OTHER; note = cEt 5-methylcytidine 3'-phosphorothioate
  modified_base 2: mod_base = OTHER; note = cEt adenosine 3'-phosphorothioate
  modified_base 3: mod_base = OTHER; note = cEt guanosine 3'-phosphorothioate
  modified_base 4..5: mod_base = OTHER; note = 2'-deoxyguanosine 3'-phosphorothioate
  modified_base 6: mod_base = OTHER; note = 5-methyl-2'-deoxycytidine 3'-phosphorothioate
  modified_base 7: mod_base = OTHER; note = 2'-deoxyadenosine 3'-phosphorothioate
  modified_base 8..10: mod_base = OTHER; note = 5-methyl-2'-deoxycytidine 3'-phosphorothioate
  modified_base 11..12: mod_base = OTHER; note = 2'-deoxyguanosine 3'-phosphorothioate
  modified_base 13: mod_base = OTHER; note = 2'-deoxyadenosine 3'-phosphorothioate
  modified_base 14..15: mod_base = OTHER; note = cEt guanosine 3'-phosphorothioate
  modified_base 16: mod_base = OTHER; note = cEt adenosine
cagggcacccggagga

SEQ ID NO: 1288 - DNA, 16 bp, synthetic construct
  source 1..16: mol_type = other DNA
  modified_base 1: mod_base = OTHER; note = cEt thymidine 3'-phosphorothioate
  modified_base 2: mod_base = OTHER; note = cEt guanosine 3'-phosphorothioate
  modified_base 3: mod_base = OTHER; note = cEt 5-methylcytidine 3'-phosphorothioate
  modified_base 4: mod_base = OTHER; note = 2'-deoxyadenosine 3'-phosphorothioate
  modified_base 5..7: mod_base = OTHER; note = 2'-deoxyguanosine 3'-phosphorothioate
  modified_base 8: mod_base = OTHER; note = 5-methyl-2'-deoxycytidine 3'-phosphorothioate
  modified_base 9: mod_base = OTHER; note = 2'-deoxyadenosine 3'-phosphorothioate
  modified_base 10..12: mod_base = OTHER; note = 5-methyl-2'-deoxycytidine 3'-phosphorothioate
  modified_base 13: mod_base = OTHER; note = 2'-deoxyguanosine 3'-phosphorothioate
  modified_base 14: mod_base = OTHER; note = cEt guanosine 3'-phosphorothioate
  modified_base 15: mod_base = OTHER; note = cEt adenosine 3'-phosphorothioate
  modified_base 16: mod_base = OTHER; note = cEt guanosine
tgcagggcacccggag

SEQ ID NO: 1289 - DNA, 16 bp, synthetic construct
  source 1..16: mol_type = other DNA
  modified_base 1..2: mod_base = OTHER; note = cEt 5-methylcytidine 3'-phosphorothioate
  modified_base 3: mod_base = OTHER; note = cEt thymidine 3'-phosphorothioate
  modified_base 4: mod_base = OTHER; note = 2'-deoxyguanosine 3'-phosphorothioate
  modified_base 5: mod_base = OTHER; note = 5-methyl-2'-deoxycytidine 3'-phosphorothioate
  modified_base 6: mod_base = OTHER; note = 2'-deoxyadenosine 3'-phosphorothioate
  modified_base 7..9: mod_base = OTHER; note = 2'-deoxyguanosine 3'-phosphorothioate
  modified_base 10: mod_base = OTHER; note = 5-methyl-2'-deoxycytidine 3'-phosphorothioate
  modified_base 11: mod_base = OTHER; note = 2'-deoxyadenosine 3'-phosphorothioate
  modified_base 12..13: mod_base = OTHER; note = 5-methyl-2'-deoxycytidine 3'-phosphorothioate
  modified_base 14: mod_base = OTHER; note = cEt 5-methylcytidine 3'-phosphorothioate
  modified_base 15: mod_base = OTHER; note = cEt guanosine 3'-phosphorothioate
  modified_base 16: mod_base = OTHER; note = cEt guanosine
cctgcagggcacccgg

SEQ ID NO: 1290 - DNA, 16 bp, synthetic construct
  source 1..16: mol_type = other DNA
  modified_base 1: mod_base = OTHER; note = cEt 5-methylcytidine 3'-phosphorothioate
  modified_base 2: mod_base = OTHER; note = cEt guanosine 3'-phosphorothioate
  modified_base 3: mod_base = OTHER; note = cEt adenosine 3'-phosphorothioate
  modified_base 4: mod_base = OTHER; note = 5-methyl-2'-deoxycytidine 3'-phosphorothioate
  modified_base 5: mod_base = OTHER; note = 2'-deoxyadenosine 3'-phosphorothioate
  modified_base 6..7: mod_base = OTHER; note = 5-methyl-2'-deoxycytidine 3'-phosphorothioate
  modified_base 8: mod_base = OTHER; note = 2'-deoxythymidine 3'-phosphorothioate
  modified_base 9: mod_base = OTHER; note = 2'-deoxyguanosine 3'-phosphorothioate
  modified_base 10: mod_base = OTHER; note = 5-methyl-2'-deoxycytidine 3'-phosphorothioate
  modified_base 11: mod_base = OTHER; note = 2'-deoxyadenosine 3'-phosphorothioate
  modified_base 12..13: mod_base = OTHER; note = 2'-deoxyguanosine 3'-phosphorothioate
  modified_base 14: mod_base = OTHER; note = cEt guanosine 3'-phosphorothioate
  modified_base 15: mod_base = OTHER; note = cEt 5-methylcytidine 3'-phosphorothioate
  modified_base 16: mod_base = OTHER; note = cEt adenosine
cgacacctgcagggca

SEQ ID NO: 1291 - DNA, 16 bp, synthetic construct
  source 1..16: mol_type = other DNA
  modified_base 1: mod_base = OTHER; note = cEt 5-methylcytidine 3'-phosphorothioate
  modified_base 3: mod_base = OTHER; note = cEt 5-methylcytidine 3'-phosphorothioate
  modified_base 2: mod_base = OTHER; note = cEt adenosine 3'-phosphorothioate
  modified_base 4: mod_base = OTHER; note = 2'-deoxyguanosine 3'-phosphorothioate
  modified_base 5: mod_base = OTHER; note = 2'-deoxyadenosine 3'-phosphorothioate
  modified_base 6: mod_base = OTHER; note = 5-methyl-2'-deoxycytidine 3'-phosphorothioate
  modified_base 7: mod_base = OTHER; note = 2'-deoxyadenosine 3'-phosphorothioate
  modified_base 8..9: mod_base = OTHER; note = 5-methyl-2'-deoxycytidine 3'-phosphorothioate
  modified_base 10: mod_base = OTHER; note = 2'-deoxythymidine 3'-phosphorothioate
  modified_base 11: mod_base = OTHER; note = 2'-deoxyguanosine 3'-phosphorothioate
  modified_base 12: mod_base = OTHER; note = 5-methyl-2'-deoxycytidine 3'-phosphorothioate
  modified_base 13: mod_base = OTHER; note = 2'-deoxyadenosine 3'-phosphorothioate
  modified_base 14..15: mod_base = OTHER; note = cEt guanosine 3'-phosphorothioate
  modified_base 16: mod_base = OTHER; note = cEt guanosine
cacgacacctgcaggg

SEQ ID NO: 1292 - DNA, 16 bp, synthetic construct
  source 1..16: mol_type = other DNA
  modified_base 1: mod_base = OTHER; note = cEt adenosine 3'-phosphorothioate
  modified_base 2: mod_base = OTHER; note = cEt guanosine 3'-phosphorothioate
  modified_base 3: mod_base = OTHER; note = cEt 5-methylcytidine 3'-phosphorothioate
  modified_base 4: mod_base = OTHER; note = 2'-deoxyadenosine 3'-phosphorothioate
  modified_base 5: mod_base = OTHER; note = 5-methyl-2'-deoxycytidine 3'-phosphorothioate
  modified_base 6: mod_base = OTHER; note = 2'-deoxyguanosine 3'-phosphorothioate
  modified_base 7: mod_base = OTHER; note = 2'-deoxyadenosine 3'-phosphorothioate
  modified_base 8: mod_base = OTHER; note = 5-methyl-2'-deoxycytidine 3'-phosphorothioate
  modified_base 9: mod_base = OTHER; note = 2'-deoxyadenosine 3'-phosphorothioate
  modified_base 10..11: mod_base = OTHER; note = 5-methyl-2'-deoxycytidine 3'-phosphorothioate
  modified_base 12: mod_base = OTHER; note = 2'-deoxythymidine 3'-phosphorothioate
  modified_base 13: mod_base = OTHER; note = 2'-deoxyguanosine 3'-phosphorothioate
  modified_base 14: mod_base = OTHER; note = cEt 5-methylcytidine 3'-phosphorothioate
  modified_base 15: mod_base = OTHER; note = cEt adenosine 3'-phosphorothioate
  modified_base 16: mod_base = OTHER; note = cEt guanosine
agcacgacacctgcag

SEQ ID NO: 1293 - DNA, 16 bp, synthetic construct
  source 1..16: mol_type = other DNA
  modified_base 1: mod_base = OTHER; note = cEt guanosine 3'-phosphorothioate
  modified_base 2..3: mod_base = OTHER; note = cEt adenosine 3'-phosphorothioate
  modified_base 4: mod_base = OTHER; note = 2'-deoxyguanosine 3'-phosphorothioate
  modified_base 5: mod_base = OTHER; note = 5-methyl-2'-deoxycytidine 3'-phosphorothioate
  modified_base 6: mod_base = OTHER; note = 2'-deoxyadenosine 3'-phosphorothioate
gaagcacgacacctgc

SEQ ID NO: 1294 - DNA, 16 bp, synthetic construct
  source 1..16: mol_type = other DNA
  modified_base 1: mod_base = OTHER; note = cEt guanosine 3'-phosphorothioate
  modified_base 2..3: mod_base = OTHER; note = cEt adenosine 3'-phosphorothioate
  modified_base 4: mod_base = OTHER; note = 2'-deoxyguanosine 3'-phosphorothioate
  modified_base 5: mod_base = OTHER; note = 5-methyl-2'-deoxycytidine 3'-phosphorothioate
  modified_base 6: mod_base = OTHER; note = 2'-deoxyadenosine 3'-phosphorothioate
  modified_base 7: mod_base = OTHER; note = 5-methyl-2'-deoxycytidine 3'-phosphorothioate
  modified_base 8: mod_base = OTHER; note = 2'-deoxyguanosine 3'-phosphorothioate
  modified_base 9: mod_base = OTHER; note = 2'-deoxyadenosine 3'-phosphorothioate
  modified_base 10: mod_base = OTHER; note = 5-methyl-2'-deoxycytidine 3'-phosphorothioate
  modified_base 11: mod_base = OTHER; note = 2'-deoxyadenosine 3'-phosphorothioate
  modified_base 12..13: mod_base = OTHER; note = 5-methyl-2'-deoxycytidine 3'-phosphorothioate
  modified_base 14: mod_base = OTHER; note = cEt thymidine 3'-phosphorothioate
  modified_base 15: mod_base = OTHER; note = cEt guanosine 3'-phosphorothioate
  modified_base 16: mod_base = OTHER; note = cEt 5-methylcytidine
ccaggtagttctcatc

SEQ ID NO: 1295 - DNA, 16 bp, synthetic construct
  source 1..16: mol_type = other DNA
  modified_base 1..2: mod_base = OTHER; note = cEt 5-methylcytidine 3'-phosphorothioate
  modified_base 3: mod_base = OTHER; note = cEt adenosine 3'-phosphorothioate
  modified_base 4..5: mod_base = OTHER; note = 2'-deoxyguanosine 3'-phosphorothioate
  modified_base 6: mod_base = OTHER; note = 2'-deoxythymidine 3'-phosphorothioate
  modified_base 7: mod_base = OTHER; note = 2'-deoxyadenosine 3'-phosphorothioate
  modified_base 8: mod_base = OTHER; note = 2'-deoxyguanosine 3'-phosphorothioate
  modified_base 9..10: mod_base = OTHER; note = 2'-deoxythymidine 3'-phosphorothioate
  modified_base 11: mod_base = OTHER; note = 5-methyl-2'-deoxycytidine 3'-phosphorothioate
  modified_base 12: mod_base = OTHER; note = 2'-deoxythymidine 3'-phosphorothioate
  modified_base 13: mod_base = OTHER; note = 5-methyl-2'-deoxycytidine 3'-phosphorothioate
  modified_base 14: mod_base = OTHER; note = cEt adenosine 3'-phosphorothioate
  modified_base 15: mod_base = OTHER; note = cEt thymidine 3'-phosphorothioate
  modified_base 16: mod_base = OTHER; note = cEt 5-methylcytidine
caccaggtagttctca

SEQ ID NO: 1296 - DNA, 16 bp, synthetic construct
  source 1..16: mol_type = other DNA
  modified_base 1: mod_base = OTHER; note = cEt 5-methylcytidine 3'-phosphorothioate
  modified_base 2: mod_base = OTHER; note = cEt thymidine 3'-phosphorothioate
  modified_base 3: mod_base = OTHER; note = cEt 5-methylcytidine 3'-phosphorothioate
  modified_base 4: mod_base = OTHER; note = 2'-deoxyadenosine 3'-phosphorothioate
  modified_base 5..6: mod_base = OTHER; note = 5-methyl-2'-deoxycytidine 3'-phosphorothioate
  modified_base 7: mod_base = OTHER; note = 2'-deoxyadenosine 3'-phosphorothioate
  modified_base 8..9: mod_base = OTHER; note = 2'-deoxyguanosine 3'-phosphorothioate
  modified_base 10: mod_base = OTHER; note = 2'-deoxythymidine 3'-phosphorothioate
  modified_base 11: mod_base = OTHER; note = 2'-deoxyadenosine 3'-phosphorothioate
  modified_base 12: mod_base = OTHER; note = 2'-deoxyguanosine 3'-phosphorothioate
  modified_base 13: mod_base = OTHER; note = 2'-deoxythymidine 3'-phosphorothioate
  modified_base 14: mod_base = OTHER; note = cEt thymidine 3'-phosphorothioate
  modified_base 15: mod_base = OTHER; note = cEt 5-methylcytidine 3'-phosphorothioate
  modified_base 16: mod_base = OTHER; note = cEt thymidine
ctcaccaggtagttct

SEQ ID NO: 1297 - DNA, 16 bp, synthetic construct
  source 1..16: mol_type = other DNA
  modified_base 1: mod_base = OTHER; note = cEt adenosine 3'-phosphorothioate
  modified_base 2: mod_base = OTHER; note = cEt guanosine 3'-phosphorothioate
  modified_base 3: mod_base = OTHER; note = cEt 5-methylcytidine 3'-phosphorothioate
  modified_base 4: mod_base = OTHER; note = 2'-deoxythymidine 3'-phosphorothioate
  modified_base 5: mod_base = OTHER; note = 5-methyl-2'-deoxycytidine 3'-phosphorothioate
  modified_base 6: mod_base = OTHER; note = 2'-deoxyadenosine 3'-phosphorothioate
  modified_base 7..8: mod_base = OTHER; note = 5-methyl-2'-deoxycytidine 3'-phosphorothioate
  modified_base 9: mod_base = OTHER; note = 2'-deoxyadenosine 3'-phosphorothioate
  modified_base 10..11: mod_base = OTHER; note = 2'-deoxyguanosine 3'-phosphorothioate
  modified_base 12: mod_base = OTHER; note = 2'-deoxythymidine 3'-phosphorothioate
  modified_base 13: mod_base = OTHER; note = 2'-deoxyadenosine 3'-phosphorothioate
  modified_base 14: mod_base = OTHER; note = cEt guanosine 3'-phosphorothioate
  modified_base 15: mod_base = OTHER; note = cEt thymidine 3'-phosphorothioate
  modified_base 16: mod_base = OTHER; note = cEt thymidine
agctcaccaggtagtt

SEQ ID NO: 1298 - DNA, 16 bp, synthetic construct
  source 1..16: mol_type = other DNA
  modified_base 1..2: mod_base = OTHER; note = cEt guanosine 3'-phosphorothioate
  modified_base 3: mod_base = OTHER; note = cEt adenosine 3'-phosphorothioate
  modified_base 4: mod_base = OTHER; note = 2'-deoxyguanosine 3'-phosphorothioate
  modified_base 5: mod_base = OTHER; note = 5-methyl-2'-deoxycytidine 3'-phosphorothioate
  modified_base 6: mod_base = OTHER; note = 2'-deoxythymidine 3'-phosphorothioate
  modified_base 7: mod_base = OTHER; note = 5-methyl-2'-deoxycytidine 3'-phosphorothioate
  modified_base 8: mod_base = OTHER; note = 2'-deoxyadenosine 3'-phosphorothioate
  modified_base 9..10: mod_base = OTHER; note = 5-methyl-2'-deoxycytidine 3'-phosphorothioate
  modified_base 11: mod_base = OTHER; note = 2'-deoxyadenosine 3'-phosphorothioate
  modified_base 12..13: mod_base = OTHER; note = 2'-deoxyguanosine 3'-phosphorothioate
  modified_base 14: mod_base = OTHER; note = cEt thymidine 3'-phosphorothioate
  modified_base 15: mod_base = OTHER; note = cEt adenosine 3'-phosphorothioate
  modified_base 16: mod_base = OTHER; note = cEt guanosine
ggagctcaccaggtag

SEQ ID NO: 1299 - DNA, 16 bp, synthetic construct
  source 1..16: mol_type = other DNA
  modified_base 1..2: mod_base = OTHER; note = cEt 5-methylcytidine 3'-phosphorothioate
  modified_base 3: mod_base = OTHER; note = cEt guanosine 3'-phosphorothioate
  modified_base 4: mod_base = OTHER; note = 2'-deoxyguanosine 3'-phosphorothioate
  modified_base 5: mod_base = OTHER; note = 2'-deoxyadenosine 3'-phosphorothioate
  modified_base 6: mod_base = OTHER; note = 2'-deoxyguanosine 3'-phosphorothioate
  modified_base 7: mod_base = OTHER; note = 5-methyl-2'-deoxycytidine 3'-phosphorothioate
  modified_base 8: mod_base = OTHER; note = 2'-deoxythymidine 3'-phosphorothioate
  modified_base 9: mod_base = OTHER; note = 5-methyl-2'-deoxycytidine 3'-phosphorothioate
  modified_base 10: mod_base = OTHER; note = 2'-deoxyadenosine 3'-phosphorothioate
  modified_base 11..12: mod_base = OTHER; note = 5-methyl-2'-deoxycytidine 3'-phosphorothioate
  modified_base 13: mod_base = OTHER; note = 2'-deoxyadenosine 3'-phosphorothioate
  modified_base 14..15: mod_base = OTHER; note = cEt guanosine 3'-phosphorothioate
  modified_base 16: mod_base = OTHER; note = cEt thymidine
ccggagctcaccaggt

SEQ ID NO: 1300 - DNA, 16 bp, synthetic construct
  source 1..16: mol_type = other DNA
  modified_base 1: mod_base = OTHER; note = cEt guanosine 3'-phosphorothioate
  modified_base 2..3: mod_base = OTHER; note = cEt 5-methylcytidine 3'-phosphorothioate
  modified_base 4: mod_base = OTHER; note = 5-methyl-2'-deoxycytidine 3'-phosphorothioate
  modified_base 5..6: mod_base = OTHER; note = 2'-deoxyguanosine 3'-phosphorothioate
  modified_base 7: mod_base = OTHER; note = 2'-deoxyadenosine 3'-phosphorothioate
  modified_base 8: mod_base = OTHER; note = 2'-deoxyguanosine 3'-phosphorothioate
  modified_base 9: mod_base = OTHER; note = 5-methyl-2'-deoxycytidine 3'-phosphorothioate
  modified_base 10: mod_base = OTHER; note = 2'-deoxythymidine 3'-phosphorothioate
  modified_base 11: mod_base = OTHER; note = 5-methyl-2'-deoxycytidine 3'-phosphorothioate
  modified_base 12: mod_base = OTHER; note = 2'-deoxyadenosine 3'-phosphorothioate
  modified_base 13: mod_base = OTHER; note = 5-methyl-2'-deoxycytidine 3'-phosphorothioate
  modified_base 14: mod_base = OTHER; note = cEt 5-methylcytidine 3'-phosphorothioate
  modified_base 15: mod_base = OTHER; note = cEt adenosine 3'-phosphorothioate
  modified_base 16: mod_base = OTHER; note = cEt guanosine
gcccggagctcaccag

SEQ ID NO: 1301 - DNA, 16 bp, synthetic construct
  source 1..16: mol_type = other DNA
  modified_base 1: mod_base = OTHER; note = cEt thymidine 3'-phosphorothioate
  modified_base 2: mod_base = OTHER; note = cEt adenosine 3'-phosphorothioate
  modified_base 3: mod_base = OTHER; note = cEt guanosine 3'-phosphorothioate
  modified_base 4: mod_base = OTHER; note = 2'-deoxyadenosine 3'-phosphorothioate
  modified_base 5: mod_base = OTHER; note = 2'-deoxyguanosine 3'-phosphorothioate
  modified_base 6: mod_base = OTHER; note = 5-methyl-2'-deoxycytidine 3'-phosphorothioate
  modified_base 7..8: mod_base = OTHER; note = 2'-deoxythymidine 3'-phosphorothioate
  modified_base 9..10: mod_base = OTHER; note = 5-methyl-2'-deoxycytidine 3'-phosphorothioate
  modified_base 11: mod_base = OTHER; note = 2'-deoxythymidine 3'-phosphorothioate
  modified_base 12: mod_base = OTHER; note = 5-methyl-2'-deoxycytidine 3'-phosphorothioate
  modified_base 13: mod_base = OTHER; note = 2'-deoxythymidine 3'-phosphorothioate
  modified_base 14..15: mod_base = OTHER; note = cEt 5-methylcytidine 3'-phosphorothioate
  modified_base 16: mod_base = OTHER; note = cEt 5-methylcytidine
tagagcttcctctccc

SEQ ID NO: 1302 - DNA, 16 bp, synthetic construct
  source 1..16: mol_type = other DNA
  modified_base 1..2: mod_base = OTHER; note = cEt 5-methylcytidine 3'-phosphorothioate
  modified_base 3: mod_base = OTHER; note = cEt thymidine 3'-phosphorothioate
  modified_base 4: mod_base = OTHER; note = 2'-deoxyadenosine 3'-phosphorothioate
  modified_base 5: mod_base = OTHER; note = 2'-deoxyguanosine 3'-phosphorothioate
  modified_base 6: mod_base = OTHER; note = 2'-deoxyadenosine 3'-phosphorothioate
  modified_base 7: mod_base = OTHER; note = 2'-deoxyguanosine 3'-phosphorothioate
  modified_base 8: mod_base = OTHER; note = 5-methyl-2'-deoxycytidine 3'-phosphorothioate
  modified_base 9..10: mod_base = OTHER; note = 2'-deoxythymidine 3'-phosphorothioate
  modified_base 11..12: mod_base = OTHER; note = 5-methyl-2'-deoxycytidine 3'-phosphorothioate
  modified_base 13: mod_base = OTHER; note = 2'-deoxythymidine 3'-phosphorothioate
  modified_base 14: mod_base = OTHER; note = cEt 5-methylcytidine 3'-phosphorothioate
  modified_base 15: mod_base = OTHER; note = cEt thymidine 3'-phosphorothioate
  modified_base 16: mod_base = OTHER; note = cEt 5-methylcytidine
cctagagcttcctctc

SEQ ID NO: 1303 - DNA, 16 bp, synthetic construct
  source 1..16: mol_type = other DNA
  modified_base 1: mod_base = OTHER; note = cEt adenosine 3'-phosphorothioate
  modified_base 2: mod_base = OTHER; note = cEt thymidine 3'-phosphorothioate
  modified_base 3: mod_base = OTHER; note = cEt 5-methylcytidine 3'-phosphorothioate
  modified_base 4: mod_base = OTHER; note = 5-methyl-2'-deoxycytidine 3'-phosphorothioate
  modified_base 5: mod_base = OTHER; note = 2'-deoxythymidine 3'-phosphorothioate
  modified_base 6: mod_base = OTHER; note = 2'-deoxyadenosine 3'-phosphorothioate
  modified_base 7: mod_base = OTHER; note = 2'-deoxyguanosine 3'-phosphorothioate
  modified_base 8: mod_base = OTHER; note = 2'-deoxyadenosine 3'-phosphorothioate
  modified_base 9: mod_base = OTHER; note = 2'-deoxyguanosine 3'-phosphorothioate
  modified_base 10: mod_base = OTHER; note = 5-methyl-2'-deoxycytidine 3'-phosphorothioate
  modified_base 11..12: mod_base = OTHER; note = 2'-deoxythymidine 3'-phosphorothioate
  modified_base 13: mod_base = OTHER; note = 5-methyl-2'-deoxycytidine 3'-phosphorothioate
  modified_base 14: mod_base = OTHER; note = cEt 5-methylcytidine 3'-phosphorothioate
  modified_base 15: mod_base = OTHER; note = cEt thymidine 3'-phosphorothioate
  modified_base 16: mod_base = OTHER; note = cEt 5-methylcytidine
atcctagagcttcctc

SEQ ID NO: 1304 - DNA, 16 bp, synthetic construct
  source 1..16: mol_type = other DNA
  modified_base 1: mod_base = OTHER; note = cEt 5-methylcytidine 3'-phosphorothioate
  modified_base 2..3: mod_base = OTHER; note = cEt adenosine 3'-phosphorothioate
  modified_base 4: mod_base = OTHER; note = 2'-deoxythymidine 3'-phosphorothioate
  modified_base 5..6: mod_base = OTHER; note = 5-methyl-2'-deoxycytidine 3'-phosphorothioate
  modified_base 7: mod_base = OTHER; note = 2'-deoxythymidine 3'-phosphorothioate
  modified_base 8: mod_base = OTHER; note = 2'-deoxyadenosine 3'-phosphorothioate
  modified_base 10: mod_base = OTHER; note = 2'-deoxyadenosine 3'-phosphorothioate
  modified_base 9: mod_base = OTHER; note = 2'-deoxyguanosine 3'-phosphorothioate
  modified_base 11: mod_base = OTHER; note = 2'-deoxyguanosine 3'-phosphorothioate
  modified_base 12: mod_base = OTHER; note = 5-methyl-2'-deoxycytidine 3'-phosphorothioate
  modified_base 13: mod_base = OTHER; note = 2'-deoxythymidine 3'-phosphorothioate
  modified_base 14: mod_base = OTHER; note = cEt thymidine 3'-phosphorothioate
  modified_base 15: mod_base = OTHER; note = cEt 5-methylcytidine 3'-phosphorothioate
  modified_base 16: mod_base = OTHER; note = cEt 5-methylcytidine
caatcctagagcttcc

SEQ ID NO: 1305 - DNA, 16 bp, synthetic construct
  source 1..16: mol_type = other DNA
  modified_base 1..3: mod_base = OTHER; note = cEt 5-methylcytidine 3'-phosphorothioate
  modified_base 4..5: mod_base = OTHER; note = 2'-deoxyadenosine 3'-phosphorothioate
  modified_base 6: mod_base = OTHER; note = 2'-deoxythymidine 3'-phosphorothioate
  modified_base 7..8: mod_base = OTHER; note = 5-methyl-2'-deoxycytidine 3'-phosphorothioate
  modified_base 9: mod_base = OTHER; note = 2'-deoxythymidine 3'-phosphorothioate
  modified_base 10: mod_base = OTHER; note = 2'-deoxyadenosine 3'-phosphorothioate
  modified_base 11: mod_base = OTHER; note = 2'-deoxyguanosine 3'-phosphorothioate
  modified_base 12: mod_base = OTHER; note = 2'-deoxyadenosine 3'-phosphorothioate
  modified_base 13: mod_base = OTHER; note = 2'-deoxyguanosine 3'-phosphorothioate
  modified_base 14: mod_base = OTHER; note = cEt 5-methylcytidine 3'-phosphorothioate
  modified_base 15: mod_base = OTHER; note = cEt thymidine 3'-phosphorothioate
  modified_base 16: mod_base = OTHER; note = cEt thymidine
cccaatcctagagctt

SEQ ID NO: 1306 - DNA, 16 bp, synthetic construct
  source 1..16: mol_type = other DNA
  modified_base 1..3: mod_base = OTHER; note = cEt 5-methylcytidine 3'-phosphorothioate
  modified_base 4..5: mod_base = OTHER; note = 5-methyl-2'-deoxycytidine 3'-phosphorothioate
  modified_base 6..7: mod_base = OTHER; note = 2'-deoxyadenosine 3'-phosphorothioate
  modified_base 8: mod_base = OTHER; note = 2'-deoxythymidine 3'-phosphorothioate
  modified_base 9..10: mod_base = OTHER; note = 5-methyl-2'-deoxycytidine 3'-phosphorothioate
  modified_base 11: mod_base = OTHER; note = 2'-deoxythymidine 3'-phosphorothioate
  modified_base 12: mod_base = OTHER; note = 2'-deoxyadenosine 3'-phosphorothioate
  modified_base 13: mod_base = OTHER; note = 2'-deoxyguanosine 3'-phosphorothioate
  modified_base 14: mod_base = OTHER; note = cEt adenosine 3'-phosphorothioate
  modified_base 15: mod_base = OTHER; note = cEt guanosine 3'-phosphorothioate
  modified_base 16: mod_base = OTHER; note = cEt 5-methylcytidine
cccccaatcctagagc

SEQ ID NO: 1307 - DNA, 16 bp, synthetic construct
  source 1..16: mol_type = other DNA
  modified_base 1: mod_base = OTHER; note = cEt 5-methylcytidine 3'-phosphorothioate
  modified_base 3: mod_base = OTHER; note = cEt 5-methylcytidine 3'-phosphorothioate
  modified_base 2: mod_base = OTHER; note = cEt adenosine 3'-phosphorothioate
  modified_base 4..7: mod_base = OTHER; note = 5-methyl-2'-deoxycytidine 3'-phosphorothioate
  modified_base 8..9: mod_base = OTHER; note = 2'-deoxyadenosine 3'-phosphorothioate
  modified_base 10: mod_base = OTHER; note = 2'-deoxythymidine 3'-phosphorothioate
  modified_base 11..12: mod_base = OTHER; note = 5-methyl-2'-deoxycytidine 3'-phosphorothioate
  modified_base 13: mod_base = OTHER; note = 2'-deoxythymidine 3'-phosphorothioate
  modified_base 14: mod_base = OTHER; note = cEt adenosine 3'-phosphorothioate
  modified_base 15: mod_base = OTHER; note = cEt guanosine 3'-phosphorothioate
  modified_base 16: mod_base = OTHER; note = cEt adenosine
cacccccaatcctaga

SEQ ID NO: 1308 - DNA, 16 bp, synthetic construct
  source 1..16: mol_type = other DNA
  modified_base 1: mod_base = OTHER; note = cEt adenosine 3'-phosphorothioate
  modified_base 2: mod_base = OTHER; note = cEt guanosine 3'-phosphorothioate
  modified_base 3: mod_base = OTHER; note = cEt 5-methylcytidine 3'-phosphorothioate
  modified_base 4: mod_base = OTHER; note = 2'-deoxyadenosine 3'-phosphorothioate
  modified_base 5..9: mod_base = OTHER; note = 5-methyl-2'-deoxycytidine 3'-phosphorothioate
  modified_base 10..11: mod_base = OTHER; note = 2'-deoxyadenosine 3'-phosphorothioate
  modified_base 12: mod_base = OTHER; note = 2'-deoxythymidine 3'-phosphorothioate
  modified_base 13: mod_base = OTHER; note = 5-methyl-2'-deoxycytidine 3'-phosphorothioate
  modified_base 14: mod_base = OTHER; note = cEt 5-methylcytidine 3'-phosphorothioate
  modified_base 15: mod_base = OTHER; note = cEt thymidine 3'-phosphorothioate
  modified_base 16: mod_base = OTHER; note = cEt adenosine
agcacccccaatccta

SEQ ID NO: 1309 - DNA, 16 bp, synthetic construct
  source 1..16: mol_type = other DNA
  modified_base 1: mod_base = OTHER; note = cEt guanosine 3'-phosphorothioate
  modified_base 2: mod_base = OTHER; note = cEt 5-methylcytidine 3'-phosphorothioate
  modified_base 3: mod_base = OTHER; note = cEt adenosine 3'-phosphorothioate
  modified_base 4: mod_base = OTHER; note = 2'-deoxyguanosine 3'-phosphorothioate
  modified_base 5: mod_base = OTHER; note = 5-methyl-2'-deoxycytidine 3'-phosphorothioate
  modified_base 6: mod_base = OTHER; note = 2'-deoxyadenosine 3'-phosphorothioate
  modified_base 7..11: mod_base = OTHER; note = 5-methyl-2'-deoxycytidine 3'-phosphorothioate
  modified_base 12..13: mod_base = OTHER; note = 2'-deoxyadenosine 3'-phosphorothioate
  modified_base 14: mod_base = OTHER; note = cEt thymidine 3'-phosphorothioate
  modified_base 15: mod_base = OTHER; note = cEt 5-methylcytidine 3'-phosphorothioate
  modified_base 16: mod_base = OTHER; note = cEt 5-methylcytidine
gcagcacccccaatcc

SEQ ID NO: 1310 - DNA, 16 bp, synthetic construct
  source 1..16: mol_type = other DNA
  modified_base 1..3: mod_base = OTHER; note = cEt guanosine 3'-phosphorothioate
  modified_base 4: mod_base = OTHER; note = 5-methyl-2'-deoxycytidine 3'-phosphorothioate
  modified_base 5: mod_base = OTHER; note = 2'-deoxyadenosine 3'-phosphorothioate
  modified_base 6: mod_base = OTHER; note = 2'-deoxyguanosine 3'-phosphorothioate
  modified_base 7: mod_base = OTHER; note = 5-methyl-2'-deoxycytidine 3'-phosphorothioate
  modified_base 8: mod_base = OTHER; note = 2'-deoxyadenosine 3'-phosphorothioate
  modified_base 9..13: mod_base = OTHER; note = 5-methyl-2'-deoxycytidine 3'-phosphorothioate
  modified_base 14..15: mod_base = OTHER; note = cEt adenosine 3'-phosphorothioate
  modified_base 16: mod_base = OTHER; note = cEt thymidine
gggcagcacccccaat

SEQ ID NO: 1311 - DNA, 16 bp, synthetic construct
  source 1..16: mol_type = other DNA
  modified_base 1: mod_base = OTHER; note = cEt thymidine 3'-phosphorothioate
  modified_base 2: mod_base = OTHER; note = cEt guanosine 3'-phosphorothioate
  modified_base 3: mod_base = OTHER; note = cEt adenosine 3'-phosphorothioate
  modified_base 4: mod_base = OTHER; note = 5-methyl-2'-deoxycytidine 3'-phosphorothioate
  modified_base 5: mod_base = OTHER; note = 2'-deoxyadenosine 3'-phosphorothioate
  modified_base 6: mod_base = OTHER; note = 5-methyl-2'-deoxycytidine 3'-phosphorothioate
  modified_base 7: mod_base = OTHER; note = 2'-deoxyadenosine 3'-phosphorothioate
  modified_base 8..10: mod_base = OTHER; note = 5-methyl-2'-deoxycytidine 3'-phosphorothioate
  modified_base 11: mod_base = OTHER; note = 2'-deoxythymidine 3'-phosphorothioate
  modified_base 12: mod_base = OTHER; note = 5-methyl-2'-deoxycytidine 3'-phosphorothioate
  modified_base 13: mod_base = OTHER; note = 2'-deoxythymidine 3'-phosphorothioate
  modified_base 14: mod_base = OTHER; note = cEt thymidine 3'-phosphorothioate
  modified_base 15: mod_base = OTHER; note = cEt adenosine 3'-phosphorothioate
  modified_base 16: mod_base = OTHER; note = cEt 5-methylcytidine
tgacacaccctcttac

SEQ ID NO: 1312 - DNA, 16 bp, synthetic construct
  source 1..16: mol_type = other DNA
  modified_base 1..2: mod_base = OTHER; note = cEt 5-methylcytidine 3'-phosphorothioate
  modified_base 3: mod_base = OTHER; note = cEt thymidine 3'-phosphorothioate
  modified_base 4: mod_base = OTHER; note = 2'-deoxyguanosine 3'-phosphorothioate
  modified_base 5: mod_base = OTHER; note = 2'-deoxyadenosine 3'-phosphorothioate
  modified_base 6: mod_base = OTHER; note = 5-methyl-2'-deoxycytidine 3'-phosphorothioate
  modified_base 7: mod_base = OTHER; note = 2'-deoxyadenosine 3'-phosphorothioate
  modified_base 8: mod_base = OTHER; note = 5-methyl-2'-deoxycytidine 3'-phosphorothioate
  modified_base 9: mod_base = OTHER; note = 2'-deoxyadenosine 3'-phosphorothioate
  modified_base 10..12: mod_base = OTHER; note = 5-methyl-2'-deoxycytidine 3'-phosphorothioate
  modified_base 13: mod_base = OTHER; note = 2'-deoxythymidine 3'-phosphorothioate
  modified_base 14: mod_base = OTHER; note = cEt 5-methylcytidine 3'-phosphorothioate
  modified_base 15: mod_base = OTHER; note = cEt thymidine 3'-phosphorothioate
  modified_base 16: mod_base = OTHER; note = cEt thymidine
cctgacacaccctctt

SEQ ID NO: 1313 - DNA, 16 bp, synthetic construct
  source 1..16: mol_type = other DNA
  modified_base 1: mod_base = OTHER; note = cEt 5-methylcytidine 3'-phosphorothioate
  modified_base 3: mod_base = OTHER; note = cEt 5-methylcytidine 3'-phosphorothioate
  modified_base 2: mod_base = OTHER; note = cEt adenosine 3'-phosphorothioate
  modified_base 4: mod_base = OTHER; note = 5-methyl-2'-deoxycytidine 3'-phosphorothioate
  modified_base 5: mod_base = OTHER; note = 2'-deoxythymidine 3'-phosphorothioate
  modified_base 6: mod_base = OTHER; note = 2'-deoxyguanosine 3'-phosphorothioate
  modified_base 7: mod_base = OTHER; note = 2'-deoxyadenosine 3'-phosphorothioate
  modified_base 8: mod_base = OTHER; note = 5-methyl-2'-deoxycytidine 3'-phosphorothioate
  modified_base 9: mod_base = OTHER; note = 2'-deoxyadenosine 3'-phosphorothioate
  modified_base 10: mod_base = OTHER; note = 5-methyl-2'-deoxycytidine 3'-phosphorothioate
  modified_base 11: mod_base = OTHER; note = 2'-deoxyadenosine 3'-phosphorothioate
  modified_base 12..13: mod_base = OTHER; note = 5-methyl-2'-deoxycytidine 3'-phosphorothioate
  modified_base 14: mod_base = OTHER; note = cEt 5-methylcytidine 3'-phosphorothioate
  modified_base 15: mod_base = OTHER; note = cEt thymidine 3'-phosphorothioate
  modified_base 16: mod_base = OTHER; note = cEt 5-methylcytidine
cacctgacacaccctc

SEQ ID NO: 1314 - DNA, 16 bp, synthetic construct
  source 1..16: mol_type = other DNA
  modified_base 1: mod_base = OTHER; note = cEt thymidine 3'-phosphorothioate
  modified_base 2..3: mod_base = OTHER; note = cEt 5-methylcytidine 3'-phosphorothioate
  modified_base 4: mod_base = OTHER; note = 2'-deoxyadenosine 3'-phosphorothioate
  modified_base 5..6: mod_base = OTHER; note = 5-methyl-2'-deoxycytidine 3'-phosphorothioate
  modified_base 7: mod_base = OTHER; note = 2'-deoxythymidine 3'-phosphorothioate
  modified_base 8: mod_base = OTHER; note = 2'-deoxyguanosine 3'-phosphorothioate
  modified_base 9: mod_base = OTHER; note = 2'-deoxyadenosine 3'-phosphorothioate
  modified_base 10: mod_base = OTHER; note = 5-methyl-2'-deoxycytidine 3'-phosphorothioate
  modified_base 11: mod_base = OTHER; note = 2'-deoxyadenosine 3'-phosphorothioate
  modified_base 13: mod_base = OTHER; note = 2'-deoxyadenosine 3'-phosphorothioate
  modified_base 12: mod_base = OTHER; note = 5-methyl-2'-deoxycytidine 3'-phosphorothioate
  modified_base 14..15: mod_base = OTHER; note = cEt 5-methylcytidine 3'-phosphorothioate
  modified_base 16: mod_base = OTHER; note = cEt 5-methylcytidine
tccacctgacacaccc

SEQ ID NO: 1315 - DNA, 16 bp, synthetic construct
  source 1..16: mol_type = other DNA
  modified_base 1: mod_base = OTHER; note = cEt 5-methylcytidine 3'-phosphorothioate
  modified_base 2: mod_base = OTHER; note = cEt adenosine 3'-phosphorothioate
  modified_base 3: mod_base = OTHER; note = cEt thymidine 3'-phosphorothioate
  modified_base 4..5: mod_base = OTHER; note = 5-methyl-2'-deoxycytidine 3'-phosphorothioate
  modified_base 6: mod_base = OTHER; note = 2'-deoxyadenosine 3'-phosphorothioate
  modified_base 7..8: mod_base = OTHER; note = 5-methyl-2'-deoxycytidine 3'-phosphorothioate
  modified_base 9: mod_base = OTHER; note = 2'-deoxythymidine 3'-phosphorothioate
  modified_base 10: mod_base = OTHER; note = 2'-deoxyguanosine 3'-phosphorothioate
  modified_base 11: mod_base = OTHER; note = 2'-deoxyadenosine 3'-phosphorothioate
  modified_base 12: mod_base = OTHER; note = 5-methyl-2'-deoxycytidine 3'-phosphorothioate
  modified_base 13: mod_base = OTHER; note = 2'-deoxyadenosine 3'-phosphorothioate
  modified_base 14: mod_base = OTHER; note = cEt 5-methylcytidine 3'-phosphorothioate
  modified_base 15: mod_base = OTHER; note = cEt adenosine 3'-phosphorothioate
  modified_base 16: mod_base = OTHER; note = cEt 5-methylcytidine
catccacctgacacac

SEQ ID NO: 1316 - DNA, 16 bp, synthetic construct
  source 1..16: mol_type = other DNA
  modified_base 1: mod_base = OTHER; note = cEt 5-methylcytidine 3'-phosphorothioate
  modified_base 3: mod_base = OTHER; note = cEt 5-methylcytidine 3'-phosphorothioate
  modified_base 2: mod_base = OTHER; note = cEt thymidine 3'-phosphorothioate
  modified_base 4: mod_base = OTHER; note = 2'-deoxyadenosine 3'-phosphorothioate
  modified_base 5: mod_base = OTHER; note = 2'-deoxythymidine 3'-phosphorothioate
  modified_base 6..7: mod_base = OTHER; note = 5-methyl-2'-deoxycytidine 3'-phosphorothioate
  modified_base 8: mod_base = OTHER; note = 2'-deoxyadenosine 3'-phosphorothioate
  modified_base 9..10: mod_base = OTHER; note = 5-methyl-2'-deoxycytidine 3'-phosphorothioate
  modified_base 11: mod_base = OTHER; note = 2'-deoxythymidine 3'-phosphorothioate
  modified_base 12: mod_base = OTHER; note = 2'-deoxyguanosine 3'-phosphorothioate
  modified_base 13: mod_base = OTHER; note = 2'-deoxyadenosine 3'-phosphorothioate
  modified_base 14: mod_base = OTHER; note = cEt 5-methylcytidine 3'-phosphorothioate
  modified_base 15: mod_base = OTHER; note = cEt adenosine 3'-phosphorothioate
  modified_base 16: mod_base = OTHER; note = cEt 5-methylcytidine
ctcatccacctgacac

SEQ ID NO: 1317 - DNA, 16 bp, synthetic construct
  source 1..16: mol_type = other DNA
  modified_base 1..3: mod_base = OTHER; note = cEt 5-methylcytidine 3'-phosphorothioate
  modified_base 4: mod_base = OTHER; note = 2'-deoxythymidine 3'-phosphorothioate
  modified_base 5: mod_base = OTHER; note = 5-methyl-2'-deoxycytidine 3'-phosphorothioate
  modified_base 6: mod_base = OTHER; note = 2'-deoxyadenosine 3'-phosphorothioate
  modified_base 7: mod_base = OTHER; note = 2'-deoxythymidine 3'-phosphorothioate
  modified_base 8..9: mod_base = OTHER; note = 5-methyl-2'-deoxycytidine 3'-phosphorothioate
  modified_base 10: mod_base = OTHER; note = 2'-deoxyadenosine 3'-phosphorothioate
  modified_base 11..12: mod_base = OTHER; note = 5-methyl-2'-deoxycytidine 3'-phosphorothioate
  modified_base 13: mod_base = OTHER; note = 2'-deoxythymidine 3'-phosphorothioate
  modified_base 14: mod_base = OTHER; note = cEt guanosine 3'-phosphorothioate
  modified_base 15: mod_base = OTHER; note = cEt adenosine 3'-phosphorothioate
  modified_base 16: mod_base = OTHER; note = cEt 5-methylcytidine
ccctcatccacctgac

SEQ ID NO: 1318 - DNA, 16 bp, synthetic construct
  source 1..16: mol_type = other DNA
  modified_base 1: mod_base = OTHER; note = cEt guanosine 3'-phosphorothioate
  modified_base 2..3: mod_base = OTHER; note = cEt 5-methylcytidine 3'-phosphorothioate
  modified_base 4..5: mod_base = OTHER; note = 5-methyl-2'-deoxycytidine 3'-phosphorothioate
  modified_base 6: mod_base = OTHER; note = 2'-deoxythymidine 3'-phosphorothioate
  modified_base 7: mod_base = OTHER; note = 5-methyl-2'-deoxycytidine 3'-phosphorothioate
  modified_base 8: mod_base = OTHER; note = 2'-deoxyadenosine 3'-phosphorothioate
  modified_base 9: mod_base = OTHER; note = 2'-deoxythymidine 3'-phosphorothioate
  modified_base 10..11: mod_base = OTHER; note = 5-methyl-2'-deoxycytidine 3'-phosphorothioate
  modified_base 12: mod_base = OTHER; note = 2'-deoxyadenosine 3'-phosphorothioate
  modified_base 13: mod_base = OTHER; note = 5-methyl-2'-deoxycytidine 3'-phosphorothioate
  modified_base 14: mod_base = OTHER; note = cEt 5-methylcytidine 3'-phosphorothioate
  modified_base 15: mod_base = OTHER; note = cEt thymidine 3'-phosphorothioate
  modified_base 16: mod_base = OTHER; note = cEt guanosine
gcccctcatccacctg

SEQ ID NO: 1319 - DNA, 16 bp, synthetic construct
  source 1..16: mol_type = other DNA
  modified_base 1: mod_base = OTHER; note = cEt adenosine 3'-phosphorothioate
  modified_base 2..3: mod_base = OTHER; note = cEt guanosine 3'-phosphorothioate
  modified_base 4..7: mod_base = OTHER; note = 5-methyl-2'-deoxycytidine 3'-phosphorothioate
  modified_base 8: mod_base = OTHER; note = 2'-deoxythymidine 3'-phosphorothioate
  modified_base 9: mod_base = OTHER; note = 5-methyl-2'-deoxycytidine 3'-phosphorothioate
  modified_base 10: mod_base = OTHER; note = 2'-deoxyadenosine 3'-phosphorothioate
  modified_base 11: mod_base = OTHER; note = 2'-deoxythymidine 3'-phosphorothioate
  modified_base 12..13: mod_base = OTHER; note = 5-methyl-2'-deoxycytidine 3'-phosphorothioate
  modified_base 14: mod_base = OTHER; note = cEt adenosine 3'-phosphorothioate
  modified_base 15: mod_base = OTHER; note = cEt 5-methylcytidine 3'-phosphorothioate
  modified_base 16: mod_base = OTHER; note = cEt 5-methylcytidine
aggcccctcatccacc

SEQ ID NO: 1320 - DNA, 16 bp, synthetic construct
  source 1..16: mol_type = other DNA
  modified_base 1: mod_base = OTHER; note = cEt guanosine 3'-phosphorothioate
  modified_base 2..3: mod_base = OTHER; note = cEt adenosine 3'-phosphorothioate
  modified_base 4..5: mod_base = OTHER; note = 2'-deoxyguanosine 3'-phosphorothioate
  modified_base 6..9: mod_base = OTHER; note = 5-methyl-2'-deoxycytidine 3'-phosphorothioate
  modified_base 10: mod_base = OTHER; note = 2'-deoxythymidine 3'-phosphorothioate
  modified_base 11: mod_base = OTHER; note = 5-methyl-2'-deoxycytidine 3'-phosphorothioate
  modified_base 12: mod_base = OTHER; note = 2'-deoxyadenosine 3'-phosphorothioate
  modified_base 13: mod_base = OTHER; note = 2'-deoxythymidine 3'-phosphorothioate
  modified_base 14..15: mod_base = OTHER; note = cEt 5-methylcytidine 3'-phosphorothioate
  modified_base 16: mod_base = OTHER; note = cEt adenosine
gaaggcccctcatcca

SEQ ID NO: 1321 - DNA, 16 bp, synthetic construct
  source 1..16: mol_type = other DNA
  modified_base 2..3: mod_base = OTHER; note = cEt guanosine 3'-phosphorothioate
  modified_base 4: mod_base = OTHER; note = 2'-deoxythymidine 3'-phosphorothioate
  modified_base 5..6: mod_base = OTHER; note = 2'-deoxyadenosine 3'-phosphorothioate
  modified_base 7: mod_base = OTHER; note = 2'-deoxyguanosine 3'-phosphorothioate
  modified_base 8: mod_base = OTHER; note = 2'-deoxyadenosine 3'-phosphorothioate
  modified_base 10: mod_base = OTHER; note = 2'-deoxyadenosine 3'-phosphorothioate
  modified_base 9: mod_base = OTHER; note = 2'-deoxyguanosine 3'-phosphorothioate
  modified_base 11..13: mod_base = OTHER; note = 5-methyl-2'-deoxycytidine 3'-phosphorothioate
  modified_base 14..15: mod_base = OTHER; note = cEt 5-methylcytidine 3'-phosphorothioate
  modified_base 16: mod_base = OTHER; note = cEt 5-methylcytidine
  modified_base 1: mod_base = OTHER; note = cEt adenosine 3'-phosphorothioate
aggtaagagacccccc

SEQ ID NO: 1322 - DNA, 16 bp, synthetic construct
  source 1..16: mol_type = other DNA
  modified_base 1..2: mod_base = OTHER; note = cEt 5-methylcytidine 3'-phosphorothioate
  modified_base 3: mod_base = OTHER; note = cEt adenosine 3'-phosphorothioate
  modified_base 4..5: mod_base = OTHER; note = 2'-deoxyguanosine 3'-phosphorothioate
  modified_base 6: mod_base = OTHER; note = 2'-deoxythymidine 3'-phosphorothioate
  modified_base 7..8: mod_base = OTHER; note = 2'-deoxyadenosine 3'-phosphorothioate
  modified_base 9: mod_base = OTHER; note = 2'-deoxyguanosine 3'-phosphorothioate
  modified_base 10: mod_base = OTHER; note = 2'-deoxyadenosine 3'-phosphorothioate
  modified_base 11: mod_base = OTHER; note = 2'-deoxyguanosine 3'-phosphorothioate
  modified_base 12: mod_base = OTHER; note = 2'-deoxyadenosine 3'-phosphorothioate
  modified_base 13: mod_base = OTHER; note = 5-methyl-2'-deoxycytidine 3'-phosphorothioate
  modified_base 14..15: mod_base = OTHER; note = cEt 5-methylcytidine 3'-phosphorothioate
  modified_base 16: mod_base = OTHER; note = cEt 5-methylcytidine
ccaggtaagagacccc

SEQ ID NO: 1323 - DNA, 16 bp, synthetic construct
  source 1..16: mol_type = other DNA
  modified_base 1..2: mod_base = OTHER; note = cEt thymidine 3'-phosphorothioate
  modified_base 3: mod_base = OTHER; note = cEt 5-methylcytidine 3'-phosphorothioate
  modified_base 4: mod_base = OTHER; note = 5-methyl-2'-deoxycytidine 3'-phosphorothioate
  modified_base 5: mod_base = OTHER; note = 2'-deoxyadenosine 3'-phosphorothioate
  modified_base 6..7: mod_base = OTHER; note = 2'-deoxyguanosine 3'-phosphorothioate
  modified_base 8: mod_base = OTHER; note = 2'-deoxythymidine 3'-phosphorothioate
  modified_base 9..10: mod_base = OTHER; note = 2'-deoxyadenosine 3'-phosphorothioate
  modified_base 11: mod_base = OTHER; note = 2'-deoxyguanosine 3'-phosphorothioate
  modified_base 12: mod_base = OTHER; note = 2'-deoxyadenosine 3'-phosphorothioate
  modified_base 13: mod_base = OTHER; note = 2'-deoxyguanosine 3'-phosphorothioate
  modified_base 14: mod_base = OTHER; note = cEt adenosine 3'-phosphorothioate
  modified_base 15: mod_base = OTHER; note = cEt 5-methylcytidine 3'-phosphorothioate
  modified_base 16: mod_base = OTHER; note = cEt 5-methylcytidine
ttccaggtaagagacc

SEQ ID NO: 1324 - DNA, 16 bp, synthetic construct
  source 1..16: mol_type = other DNA
  modified_base 1..2: mod_base = OTHER; note = cEt 5-methylcytidine 3'-phosphorothioate
  modified_base 3: mod_base = OTHER; note = cEt adenosine 3'-phosphorothioate
  modified_base 4..5: mod_base = OTHER; note = 2'-deoxythymidine 3'-phosphorothioate
  modified_base 6..7: mod_base = OTHER; note = 5-methyl-2'-deoxycytidine 3'-phosphorothioate
  modified_base 8: mod_base = OTHER; note = 2'-deoxyadenosine 3'-phosphorothioate
  modified_base 9..10: mod_base = OTHER; note = 2'-deoxyguanosine 3'-phosphorothioate
  modified_base 11: mod_base = OTHER; note = 2'-deoxythymidine 3'-phosphorothioate
  modified_base 12..13: mod_base = OTHER; note = 2'-deoxyadenosine 3'-phosphorothioate
  modified_base 14: mod_base = OTHER; note = cEt guanosine 3'-phosphorothioate
  modified_base 15: mod_base = OTHER; note = cEt adenosine 3'-phosphorothioate
  modified_base 16: mod_base = OTHER; note = cEt guanosine
ccattccaggtaagag

SEQ ID NO: 1325 - DNA, 16 bp, synthetic construct
  source 1..16: mol_type = other DNA
  modified_base 1: mod_base = OTHER; note = cEt thymidine 3'-phosphorothioate
  modified_base 2..3: mod_base = OTHER; note = cEt 5-methylcytidine 3'-phosphorothioate
  modified_base 4: mod_base = OTHER; note = 5-methyl-2'-deoxycytidine 3'-phosphorothioate
  modified_base 5: mod_base = OTHER; note = 2'-deoxyadenosine 3'-phosphorothioate
  modified_base 6..7: mod_base = OTHER; note = 2'-deoxythymidine 3'-phosphorothioate
  modified_base 8..9: mod_base = OTHER; note = 5-methyl-2'-deoxycytidine 3'-phosphorothioate
  modified_base 10: mod_base = OTHER; note = 2'-deoxyadenosine 3'-phosphorothioate
  modified_base 11..12: mod_base = OTHER; note = 2'-deoxyguanosine 3'-phosphorothioate
  modified_base 13: mod_base = OTHER; note = 2'-deoxythymidine 3'-phosphorothioate
  modified_base 14..15: mod_base = OTHER; note = cEt adenosine 3'-phosphorothioate
  modified_base 16: mod_base = OTHER; note = cEt guanosine
tcccattccaggtaag

SEQ ID NO: 1326 - DNA, 16 bp, synthetic construct
  source 1..16: mol_type = other DNA
  modified_base 1: mod_base = OTHER; note = cEt thymidine 3'-phosphorothioate
  modified_base 3: mod_base = OTHER; note = cEt thymidine 3'-phosphorothioate
  modified_base 2: mod_base = OTHER; note = cEt adenosine 3'-phosphorothioate
  modified_base 4..6: mod_base = OTHER; note = 5-methyl-2'-deoxycytidine 3'-phosphorothioate
  modified_base 7: mod_base = OTHER; note = 2'-deoxyadenosine 3'-phosphorothioate
  modified_base 8..9: mod_base = OTHER; note = 2'-deoxythymidine 3'-phosphorothioate
  modified_base 10..11: mod_base = OTHER; note = 5-methyl-2'-deoxycytidine 3'-phosphorothioate
  modified_base 12: mod_base = OTHER; note = 2'-deoxyadenosine 3'-phosphorothioate
  modified_base 13: mod_base = OTHER; note = 2'-deoxyguanosine 3'-phosphorothioate
  modified_base 14: mod_base = OTHER; note = cEt guanosine 3'-phosphorothioate
  modified_base 15: mod_base = OTHER; note = cEt thymidine 3'-phosphorothioate
  modified_base 16: mod_base = OTHER; note = cEt adenosine
tatcccattccaggta

SEQ ID NO: 1327 - DNA, 16 bp, synthetic construct
  source 1..16: mol_type = other DNA
  modified_base 1..2: mod_base = OTHER; note = cEt 5-methylcytidine 3'-phosphorothioate
  modified_base 3: mod_base = OTHER; note = cEt thymidine 3'-phosphorothioate
  modified_base 4: mod_base = OTHER; note = 2'-deoxyadenosine 3'-phosphorothioate
  modified_base 5: mod_base = OTHER; note = 2'-deoxythymidine 3'-phosphorothioate
  modified_base 6..8: mod_base = OTHER; note = 5-methyl-2'-deoxycytidine 3'-phosphorothioate
  modified_base 9: mod_base = OTHER; note = 2'-deoxyadenosine 3'-phosphorothioate
  modified_base 10..11: mod_base = OTHER; note = 2'-deoxythymidine 3'-phosphorothioate
  modified_base 12..13: mod_base = OTHER; note = 5-methyl-2'-deoxycytidine 3'-phosphorothioate
  modified_base 14: mod_base = OTHER; note = cEt adenosine 3'-phosphorothioate
  modified_base 15: mod_base = OTHER; note = cEt guanosine 3'-phosphorothioate
  modified_base 16: mod_base = OTHER; note = cEt guanosine
cctatcccattccagg

SEQ ID NO: 1328 - DNA, 16 bp, synthetic construct
  source 1..16: mol_type = other DNA
  modified_base 1: mod_base = OTHER; note = cEt guanosine 3'-phosphorothioate
  modified_base 2: mod_base = OTHER; note = cEt adenosine 3'-phosphorothioate
  modified_base 3: mod_base = OTHER; note = cEt 5-methylcytidine 3'-phosphorothioate
  modified_base 4: mod_base = OTHER; note = 5-methyl-2'-deoxycytidine 3'-phosphorothioate
  modified_base 5: mod_base = OTHER; note = 2'-deoxythymidine 3'-phosphorothioate
  modified_base 6: mod_base = OTHER; note = 2'-deoxyadenosine 3'-phosphorothioate
  modified_base 7: mod_base = OTHER; note = 2'-deoxythymidine 3'-phosphorothioate
  modified_base 8..10: mod_base = OTHER; note = 5-methyl-2'-deoxycytidine 3'-phosphorothioate
  modified_base 11: mod_base = OTHER; note = 2'-deoxyadenosine 3'-phosphorothioate
  modified_base 12..13: mod_base = OTHER; note = 2'-deoxythymidine 3'-phosphorothioate
  modified_base 14..15: mod_base = OTHER; note = cEt 5-methylcytidine 3'-phosphorothioate
  modified_base 16: mod_base = OTHER; note = cEt adenosine
gacctatcccattcca

SEQ ID NO: 1329 - DNA, 16 bp, synthetic construct
  source 1..16: mol_type = other DNA
  modified_base 1..2: mod_base = OTHER; note = cEt adenosine 3'-phosphorothioate
  modified_base 3: mod_base = OTHER; note = cEt guanosine 3'-phosphorothioate
  modified_base 4: mod_base = OTHER; note = 2'-deoxyadenosine 3'-phosphorothioate
  modified_base 5..6: mod_base = OTHER; note = 5-methyl-2'-deoxycytidine 3'-phosphorothioate
  modified_base 7: mod_base = OTHER; note = 2'-deoxythymidine 3'-phosphorothioate
  modified_base 8: mod_base = OTHER; note = 2'-deoxyadenosine 3'-phosphorothioate
  modified_base 9: mod_base = OTHER; note = 2'-deoxythymidine 3'-phosphorothioate
  modified_base 10..12: mod_base = OTHER; note = 5-methyl-2'-deoxycytidine 3'-phosphorothioate
  modified_base 13: mod_base = OTHER; note = 2'-deoxyadenosine 3'-phosphorothioate
  modified_base 14..15: mod_base = OTHER; note = cEt thymidine 3'-phosphorothioate
  modified_base 16: mod_base = OTHER; note = cEt 5-methylcytidine
aagacctatcccattc

SEQ ID NO: 1330 - DNA, 16 bp, synthetic construct
  source 1..16: mol_type = other DNA
  modified_base 1: mod_base = OTHER; note = cEt thymidine 3'-phosphorothioate
  modified_base 2: mod_base = OTHER; note = cEt guanosine 3'-phosphorothioate
  modified_base 3: mod_base = OTHER; note = cEt adenosine 3'-phosphorothioate
  modified_base 4: mod_base = OTHER; note = 2'-deoxyadenosine 3'-phosphorothioate
  modified_base 5: mod_base = OTHER; note = 2'-deoxyguanosine 3'-phosphorothioate
  modified_base 6: mod_base = OTHER; note = 2'-deoxyadenosine 3'-phosphorothioate
  modified_base 7..8: mod_base = OTHER; note = 5-methyl-2'-deoxycytidine 3'-phosphorothioate
  modified_base 9: mod_base = OTHER; note = 2'-deoxythymidine 3'-phosphorothioate
  modified_base 10: mod_base = OTHER; note = 2'-deoxyadenosine 3'-phosphorothioate
  modified_base 11: mod_base = OTHER; note = 2'-deoxythymidine 3'-phosphorothioate
  modified_base 12..13: mod_base = OTHER; note = 5-methyl-2'-deoxycytidine 3'-phosphorothioate
  modified_base 14: mod_base = OTHER; note = cEt 5-methylcytidine 3'-phosphorothioate
  modified_base 15: mod_base = OTHER; note = cEt adenosine 3'-phosphorothioate
  modified_base 16: mod_base = OTHER; note = cEt thymidine
tgaagacctatcccat

SEQ ID NO: 1331 - DNA, 16 bp, synthetic construct
  source 1..16: mol_type = other DNA
  modified_base 1: mod_base = OTHER; note = cEt thymidine 3'-phosphorothioate
  modified_base 2..3: mod_base = OTHER; note = cEt guanosine 3'-phosphorothioate
  modified_base 4..7: mod_base = OTHER; note = 5-methyl-2'-deoxycytidine 3'-phosphorothioate
  modified_base 8: mod_base = OTHER; note = 2'-deoxyguanosine 3'-phosphorothioate
  modified_base 9..10: mod_base = OTHER; note = 2'-deoxythymidine 3'-phosphorothioate
  modified_base 11: mod_base = OTHER; note = 2'-deoxyadenosine 3'-phosphorothioate
  modified_base 12: mod_base = OTHER; note = 2'-deoxyguanosine 3'-phosphorothioate
  modified_base 13: mod_base = OTHER; note = 2'-deoxyadenosine 3'-phosphorothioate
  modified_base 14: mod_base = OTHER; note = cEt adenosine 3'-phosphorothioate
  modified_base 15: mod_base = OTHER; note = cEt thymidine 3'-phosphorothioate
  modified_base 16: mod_base = OTHER; note = cEt thymidine
tggccccgttagaatt

SEQ ID NO: 1332 - DNA, 16 bp, synthetic construct
  source 1..16: mol_type = other DNA
  modified_base 1: mod_base = OTHER; note = cEt adenosine 3'-phosphorothioate
  modified_base 2: mod_base = OTHER; note = cEt guanosine 3'-phosphorothioate
  modified_base 3: mod_base = OTHER; note = cEt thymidine 3'-phosphorothioate
  modified_base 4..5: mod_base = OTHER; note = 2'-deoxyguanosine 3'-phosphorothioate
  modified_base 6..9: mod_base = OTHER; note = 5-methyl-2'-deoxycytidine 3'-phosphorothioate
  modified_base 10: mod_base = OTHER; note = 2'-deoxyguanosine 3'-phosphorothioate
  modified_base 11..12: mod_base = OTHER; note = 2'-deoxythymidine 3'-phosphorothioate
  modified_base 13: mod_base = OTHER; note = 2'-deoxyadenosine 3'-phosphorothioate
  modified_base 14: mod_base = OTHER; note = cEt guanosine 3'-phosphorothioate
  modified_base 15: mod_base = OTHER; note = cEt adenosine 3'-phosphorothioate
  modified_base 16: mod_base = OTHER; note = cEt adenosine
agtggccccgttagaa

SEQ ID NO: 1333 - DNA, 16 bp, synthetic construct
  source 1..16: mol_type = other DNA
  modified_base 1: mod_base = OTHER; note = cEt guanosine 3'-phosphorothioate
  modified_base 2: mod_base = OTHER; note = cEt 5-methylcytidine 3'-phosphorothioate
  modified_base 3: mod_base = OTHER; note = cEt adenosine 3'-phosphorothioate
  modified_base 4: mod_base = OTHER; note = 2'-deoxyguanosine 3'-phosphorothioate
  modified_base 5: mod_base = OTHER; note = 2'-deoxythymidine 3'-phosphorothioate
  modified_base 6..7: mod_base = OTHER; note = 2'-deoxyguanosine 3'-phosphorothioate
  modified_base 8..11: mod_base = OTHER; note = 5-methyl-2'-deoxycytidine 3'-phosphorothioate
  modified_base 12: mod_base = OTHER; note = 2'-deoxyguanosine 3'-phosphorothioate
  modified_base 13: mod_base = OTHER; note = 2'-deoxythymidine 3'-phosphorothioate
  modified_base 14: mod_base = OTHER; note = cEt thymidine 3'-phosphorothioate
  modified_base 15: mod_base = OTHER; note = cEt adenosine 3'-phosphorothioate
  modified_base 16: mod_base = OTHER; note = cEt guanosine
gcagtggccccgttag

SEQ ID NO: 1334 - DNA, 16 bp, synthetic construct
  source 1..16: mol_type = other DNA
  modified_base 1: mod_base = OTHER; note = cEt adenosine 3'-phosphorothioate
  modified_base 2..3: mod_base = OTHER; note = cEt guanosine 3'-phosphorothioate
  modified_base 4: mod_base = OTHER; note = 5-methyl-2'-deoxycytidine 3'-phosphorothioate
  modified_base 5: mod_base = OTHER; note = 2'-deoxyadenosine 3'-phosphorothioate
  modified_base 6: mod_base = OTHER; note = 2'-deoxyguanosine 3'-phosphorothioate
  modified_base 7: mod_base = OTHER; note = 2'-deoxythymidine 3'-phosphorothioate
  modified_base 8..9: mod_base = OTHER; note = 2'-deoxyguanosine 3'-phosphorothioate
  modified_base 10..13: mod_base = OTHER; note = 5-methyl-2'-deoxycytidine 3'-phosphorothioate
  modified_base 14: mod_base = OTHER; note = cEt guanosine 3'-phosphorothioate
  modified_base 15: mod_base = OTHER; note = cEt thymidine 3'-phosphorothioate
  modified_base 16: mod_base = OTHER; note = cEt thymidine
aggcagtggccccgtt

SEQ ID NO: 1335 - DNA, 16 bp, synthetic construct
  source 1..16: mol_type = other DNA
  modified_base 1: mod_base = OTHER; note = cEt 5-methylcytidine 3'-phosphorothioate
  modified_base 2: mod_base = OTHER; note = cEt thymidine 3'-phosphorothioate
  modified_base 3: mod_base = OTHER; note = cEt adenosine 3'-phosphorothioate
  modified_base 4..5: mod_base = OTHER; note = 2'-deoxyguanosine 3'-phosphorothioate
  modified_base 6: mod_base = OTHER; note = 5-methyl-2'-deoxycytidine 3'-phosphorothioate
  modified_base 7: mod_base = OTHER; note = 2'-deoxyadenosine 3'-phosphorothioate
  modified_base 8: mod_base = OTHER; note = 2'-deoxyguanosine 3'-phosphorothioate
  modified_base 9: mod_base = OTHER; note = 2'-deoxythymidine 3'-phosphorothioate
  modified_base 10..11: mod_base = OTHER; note = 2'-deoxyguanosine 3'-phosphorothioate
  modified_base 12..13: mod_base = OTHER; note = 5-methyl-2'-deoxycytidine 3'-phosphorothioate
  modified_base 14..15: mod_base = OTHER; note = cEt 5-methylcytidine 3'-phosphorothioate
  modified_base 16: mod_base = OTHER; note = cEt guanosine
ctaggcagtggccccg

SEQ ID NO: 1336 - DNA, 16 bp, synthetic construct
  source 1..16: mol_type = other DNA
  modified_base 1..3: mod_base = OTHER; note = cEt 5-methylcytidine 3'-phosphorothioate
  modified_base 4: mod_base = OTHER; note = 2'-deoxythymidine 3'-phosphorothioate
  modified_base 5: mod_base = OTHER; note = 2'-deoxyadenosine 3'-phosphorothioate
  modified_base 6..7: mod_base = OTHER; note = 2'-deoxyguanosine 3'-phosphorothioate
  modified_base 8: mod_base = OTHER; note = 5-methyl-2'-deoxycytidine 3'-phosphorothioate
  modified_base 9: mod_base = OTHER; note = 2'-deoxyadenosine 3'-phosphorothioate
  modified_base 10: mod_base = OTHER; note = 2'-deoxyguanosine 3'-phosphorothioate
  modified_base 11: mod_base = OTHER; note = 2'-deoxythymidine 3'-phosphorothioate
  modified_base 12..13: mod_base = OTHER; note = 2'-deoxyguanosine 3'-phosphorothioate
  modified_base 14..15: mod_base = OTHER; note = cEt 5-methylcytidine 3'-phosphorothioate
  modified_base 16: mod_base = OTHER; note = cEt 5-methylcytidine
ccctaggcagtggccc

SEQ ID NO: 1337 - DNA, 16 bp, synthetic construct
  source 1..16: mol_type = other DNA
  modified_base 1: mod_base = OTHER; note = cEt adenosine 3'-phosphorothioate
  modified_base 2..3: mod_base = OTHER; note = cEt guanosine 3'-phosphorothioate
  modified_base 4: mod_base = OTHER; note = 2'-deoxythymidine 3'-phosphorothioate
  modified_base 5..7: mod_base = OTHER; note = 5-methyl-2'-deoxycytidine 3'-phosphorothioate
  modified_base 8: mod_base = OTHER; note = 2'-deoxyadenosine 3'-phosphorothioate
  modified_base 9: mod_base = OTHER; note = 2'-deoxyguanosine 3'-phosphorothioate
  modified_base 10: mod_base = OTHER; note = 2'-deoxyadenosine 3'-phosphorothioate
  modified_base 11: mod_base = OTHER; note = 5-methyl-2'-deoxycytidine 3'-phosphorothioate
  modified_base 12: mod_base = OTHER; note = 2'-deoxyadenosine 3'-phosphorothioate
  modified_base 13: mod_base = OTHER; note = 5-methyl-2'-deoxycytidine 3'-phosphorothioate
  modified_base 14: mod_base = OTHER; note = cEt thymidine 3'-phosphorothioate
  modified_base 15: mod_base = OTHER; note = cEt 5-methylcytidine 3'-phosphorothioate
  modified_base 16: mod_base = OTHER; note = cEt 5-methylcytidine
aggtcccagacactcc

SEQ ID NO: 1338 - DNA, 16 bp, synthetic construct
  source 1..16: mol_type = other DNA
  modified_base 1: mod_base = OTHER; note = cEt adenosine 3'-phosphorothioate
  modified_base 3: mod_base = OTHER; note = cEt adenosine 3'-phosphorothioate
  modified_base 2: mod_base = OTHER; note = cEt thymidine 3'-phosphorothioate
  modified_base 4..5: mod_base = OTHER; note = 2'-deoxyguanosine 3'-phosphorothioate
  modified_base 6: mod_base = OTHER; note = 2'-deoxythymidine 3'-phosphorothioate
  modified_base 7..9: mod_base = OTHER; note = 5-methyl-2'-deoxycytidine 3'-phosphorothioate
  modified_base 10: mod_base = OTHER; note = 2'-deoxyadenosine 3'-phosphorothioate
  modified_base 12: mod_base = OTHER; note = 2'-deoxyadenosine 3'-phosphorothioate
  modified_base 11: mod_base = OTHER; note = 2'-deoxyguanosine 3'-phosphorothioate
  modified_base 13: mod_base = OTHER; note = 5-methyl-2'-deoxycytidine 3'-phosphorothioate
  modified_base 14: mod_base = OTHER; note = cEt adenosine 3'-phosphorothioate
  modified_base 15: mod_base = OTHER; note = cEt 5-methylcytidine 3'-phosphorothioate
  modified_base 16: mod_base = OTHER; note = cEt thymidine
ataggtcccagacact

SEQ ID NO: 1339 - DNA, 16 bp, synthetic construct
  source 1..16: mol_type = other DNA
  modified_base 1: mod_base = OTHER; note = cEt guanosine 3'-phosphorothioate
  modified_base 2..3: mod_base = OTHER; note = cEt adenosine 3'-phosphorothioate
  modified_base 4: mod_base = OTHER; note = 2'-deoxythymidine 3'-phosphorothioate
  modified_base 5: mod_base = OTHER; note = 2'-deoxyadenosine 3'-phosphorothioate
  modified_base 6..7: mod_base = OTHER; note = 2'-deoxyguanosine 3'-phosphorothioate
  modified_base 8: mod_base = OTHER; note = 2'-deoxythymidine 3'-phosphorothioate
  modified_base 9..11: mod_base = OTHER; note = 5-methyl-2'-deoxycytidine 3'-phosphorothioate
  modified_base 12: mod_base = OTHER; note = 2'-deoxyadenosine 3'-phosphorothioate
  modified_base 13: mod_base = OTHER; note = 2'-deoxyguanosine 3'-phosphorothioate
  modified_base 14: mod_base = OTHER; note = cEt adenosine 3'-phosphorothioate
  modified_base 15: mod_base = OTHER; note = cEt 5-methylcytidine 3'-phosphorothioate
  modified_base 16: mod_base = OTHER; note = cEt adenosine
gaataggtcccagaca

SEQ ID NO: 1340 - DNA, 16 bp, synthetic construct
  source 1..16: mol_type = other DNA
  modified_base 1: mod_base = OTHER; note = cEt guanosine 3'-phosphorothioate
  modified_base 3: mod_base = OTHER; note = cEt guanosine 3'-phosphorothioate
  modified_base 2: mod_base = OTHER; note = cEt adenosine 3'-phosphorothioate
  modified_base 4..5: mod_base = OTHER; note = 2'-deoxyadenosine 3'-phosphorothioate
  modified_base 6: mod_base = OTHER; note = 2'-deoxythymidine 3'-phosphorothioate
  modified_base 7: mod_base = OTHER; note = 2'-deoxyadenosine 3'-phosphorothioate
  modified_base 8..9: mod_base = OTHER; note = 2'-deoxyguanosine 3'-phosphorothioate
  modified_base 10: mod_base = OTHER; note = 2'-deoxythymidine 3'-phosphorothioate
  modified_base 11..13: mod_base = OTHER; note = 5-methyl-2'-deoxycytidine 3'-phosphorothioate
  modified_base 14: mod_base = OTHER; note = cEt adenosine 3'-phosphorothioate
  modified_base 15: mod_base = OTHER; note = cEt guanosine 3'-phosphorothioate
  modified_base 16: mod_base = OTHER; note = cEt adenosine
gagaataggtcccaga

SEQ ID NO: 1341 - DNA, 16 bp, synthetic construct
  source 1..16: mol_type = other DNA
  modified_base 1: mod_base = OTHER; note = cEt 5-methylcytidine 3'-phosphorothioate
  modified_base 2: mod_base = OTHER; note = cEt adenosine 3'-phosphorothioate
  modified_base 3: mod_base = OTHER; note = cEt guanosine 3'-phosphorothioate
  modified_base 4: mod_base = OTHER; note = 2'-deoxyadenosine 3'-phosphorothioate
  modified_base 5: mod_base = OTHER; note = 2'-deoxyguanosine 3'-phosphorothioate
  modified_base 6..7: mod_base = OTHER; note = 2'-deoxyadenosine 3'-phosphorothioate
  modified_base 8: mod_base = OTHER; note = 2'-deoxythymidine 3'-phosphorothioate
  modified_base 9: mod_base = OTHER; note = 2'-deoxyadenosine 3'-phosphorothioate
  modified_base 10..11: mod_base = OTHER; note = 2'-deoxyguanosine 3'-phosphorothioate
  modified_base 12: mod_base = OTHER; note = 2'-deoxythymidine 3'-phosphorothioate
  modified_base 13: mod_base = OTHER; note = 5-methyl-2'-deoxycytidine 3'-phosphorothioate
  modified_base 14..15: mod_base = OTHER; note = cEt 5-methylcytidine 3'-phosphorothioate
  modified_base 16: mod_base = OTHER; note = cEt adenosine
cagagaataggtccca

SEQ ID NO: 1342 - DNA, 16 bp, synthetic construct
  source 1..16: mol_type = other DNA
  modified_base 1..2: mod_base = OTHER; note = 2'-O-methoxyethyl 5-methylcytidine 3'-phosphorothioate
  modified_base 3: mod_base = OTHER; note = cEt 5-methylcytidine 3'-phosphorothioate
  modified_base 4: mod_base = OTHER; note = cEt guanosine 3'-phosphorothioate
  modified_base 5..6: mod_base = OTHER; note = 2'-deoxyadenosine 3'-phosphorothioate
  modified_base 7: mod_base = OTHER; note = 2'-deoxythymidine 3'-phosphorothioate
  modified_base 8: mod_base = OTHER; note = 2'-deoxyguanosine 3'-phosphorothioate
  modified_base 9: mod_base = OTHER; note = 2'-deoxythymidine 3'-phosphorothioate
  modified_base 10..11: mod_base = OTHER; note = 5-methyl-2'-deoxycytidine 3'-phosphorothioate
  modified_base 12: mod_base = OTHER; note = 2'-deoxyguanosine 3'-phosphorothioate
  modified_base 13: mod_base = OTHER; note = cEt adenosine 3'-phosphorothioate
  modified_base 14: mod_base = OTHER; note = cEt 5-methylcytidine 3'-phosphorothioate
  modified_base 15: mod_base = OTHER; note = 2'-O-methoxyethyl adenosine 3'-phosphorothioate
  modified_base 16: mod_base = OTHER; note = 2'-O-methoxyethyl guanosine
cccgaatgtccgacag

SEQ ID NO: 1343 - DNA, 16 bp, synthetic construct
  source 1..16: mol_type = other DNA
  modified_base 1: mod_base = OTHER; note = 2'-O-methoxyethyl thymidine 3'-phosphorothioate
  modified_base 2: mod_base = OTHER; note = 2'-O-methoxyethyl 5-methylcytidine 3'-phosphorothioate
  modified_base 3..4: mod_base = OTHER; note = cEt 5-methylcytidine 3'-phosphorothioate
  modified_base 5: mod_base = OTHER; note = 2'-deoxyguanosine 3'-phosphorothioate
  modified_base 6..7: mod_base = OTHER; note = 2'-deoxyadenosine 3'-phosphorothioate
  modified_base 8: mod_base = OTHER; note = 2'-deoxythymidine 3'-phosphorothioate
  modified_base 9: mod_base = OTHER; note = 2'-deoxyguanosine 3'-phosphorothioate
  modified_base 10: mod_base = OTHER; note = 2'-deoxythymidine 3'-phosphorothioate
  modified_base 11..12: mod_base = OTHER; note = 5-methyl-2'-deoxycytidine 3'-phosphorothioate
  modified_base 13: mod_base = OTHER; note = cEt guanosine 3'-phosphorothioate
  modified_base 14: mod_base = OTHER; note = cEt adenosine 3'-phosphorothioate
  modified_base 15: mod_base = OTHER; note = 2'-O-methoxyethyl 5-methylcytidine 3'-phosphorothioate
  modified_base 16: mod_base = OTHER; note = 2'-O-methoxyethyl adenosine
tcccgaatgtccgaca

SEQ ID NO: 1344 - DNA, 16 bp, synthetic construct
  source 1..16: mol_type = other DNA
  modified_base 1: mod_base = OTHER; note = 2'-O-methoxyethyl guanosine 3'-phosphorothioate
  modified_base 2: mod_base = OTHER; note = 2'-O-methoxyethyl thymidine 3'-phosphorothioate
  modified_base 3: mod_base = OTHER; note = cEt guanosine 3'-phosphorothioate
  modified_base 4: mod_base = OTHER; note = cEt thymidine 3'-phosphorothioate
  modified_base 5..6: mod_base = OTHER; note = 2'-deoxyadenosine 3'-phosphorothioate
  modified_base 7: mod_base = OTHER; note = 2'-deoxythymidine 3'-phosphorothioate
  modified_base 8: mod_base = OTHER; note = 2'-deoxyguanosine 3'-phosphorothioate
  modified_base 9..10: mod_base = OTHER; note = 2'-deoxythymidine 3'-phosphorothioate
  modified_base 11: mod_base = OTHER; note = 2'-deoxyguanosine 3'-phosphorothioate
  modified_base 12: mod_base = OTHER; note = 2'-deoxythymidine 3'-phosphorothioate
  modified_base 13..14: mod_base = OTHER; note = cEt 5-methylcytidine 3'-phosphorothioate
  modified_base 15: mod_base = OTHER; note = 2'-O-methoxyethyl adenosine 3'-phosphorothioate
  modified_base 16: mod_base = OTHER; note = 2'-O-methoxyethyl guanosine
gtgtaatgttgtccag

SEQ ID NO: 1345 - DNA, 16 bp, synthetic construct
  source 1..16: mol_type = other DNA
  modified_base 1: mod_base = OTHER; note = 2'-O-methoxyethyl thymidine 3'-phosphorothioate
  modified_base 3: mod_base = OTHER; note = 2'-O-methoxyethyl thymidine 3'-phosphorothioate
  modified_base 2: mod_base = OTHER; note = 2'-O-methoxyethyl 5-methylcytidine 3'-phosphorothioate
  modified_base 4..5: mod_base = OTHER; note = 5-methyl-2'-deoxycytidine 3'-phosphorothioate
  modified_base 6: mod_base = OTHER; note = 2'-deoxythymidine 3'-phosphorothioate
  modified_base 7: mod_base = OTHER; note = 5-methyl-2'-deoxycytidine 3'-phosphorothioate
  modified_base 8: mod_base = OTHER; note = 2'-deoxyadenosine 3'-phosphorothioate
  modified_base 9: mod_base = OTHER; note = 5-methyl-2'-deoxycytidine 3'-phosphorothioate
  modified_base 10..11: mod_base = OTHER; note = 2'-deoxyguanosine 3'-phosphorothioate
  modified_base 12..13: mod_base = OTHER; note = 2'-deoxyadenosine 3'-phosphorothioate
  modified_base 14: mod_base = OTHER; note = cEt guanosine 3'-phosphorothioate
  modified_base 15: mod_base = OTHER; note = cEt 5-methylcytidine 3'-phosphorothioate
  modified_base 16: mod_base = OTHER; note = cEt adenosine
tctcctcacggaagca

SEQ ID NO: 1346 - DNA, 16 bp, synthetic construct
  source 1..16: mol_type = other DNA
  modified_base 1: mod_base = OTHER; note = 2'-O-methoxyethyl 5-methylcytidine 3'-phosphorothioate
  modified_base 3: mod_base = OTHER; note = 2'-O-methoxyethyl 5-methylcytidine 3'-phosphorothioate
  modified_base 2: mod_base = OTHER; note = 2'-O-methoxyethyl thymidine 3'-phosphorothioate
  modified_base 4: mod_base = OTHER; note = 2'-deoxythymidine 3'-phosphorothioate
  modified_base 5..6: mod_base = OTHER; note = 5-methyl-2'-deoxycytidine 3'-phosphorothioate
  modified_base 7: mod_base = OTHER; note = 2'-deoxythymidine 3'-phosphorothioate
  modified_base 8: mod_base = OTHER; note = 5-methyl-2'-deoxycytidine 3'-phosphorothioate
  modified_base 9: mod_base = OTHER; note = 2'-deoxyadenosine 3'-phosphorothioate
  modified_base 10: mod_base = OTHER; note = 5-methyl-2'-deoxycytidine 3'-phosphorothioate
  modified_base 11..12: mod_base = OTHER; note = 2'-deoxyguanosine 3'-phosphorothioate
  modified_base 13: mod_base = OTHER; note = 2'-deoxyadenosine 3'-phosphorothioate
  modified_base 14: mod_base = OTHER; note = cEt adenosine 3'-phosphorothioate
  modified_base 15: mod_base = OTHER; note = cEt guanosine 3'-phosphorothioate
  modified_base 16: mod_base = OTHER; note = cEt 5-methylcytidine
ctctcctcacggaagc

SEQ ID NO: 1347 - DNA, 16 bp, synthetic construct
  source 1..16: mol_type = other DNA
  modified_base 1..2: mod_base = OTHER; note = 2'-O-methoxyethyl 5-methylcytidine 3'-phosphorothioate
  modified_base 3: mod_base = OTHER; note = 2'-O-methoxyethyl thymidine 3'-phosphorothioate
  modified_base 4: mod_base = OTHER; note = 5-methyl-2'-deoxycytidine 3'-phosphorothioate
  modified_base 5: mod_base = OTHER; note = 2'-deoxythymidine 3'-phosphorothioate
  modified_base 6..7: mod_base = OTHER; note = 5-methyl-2'-deoxycytidine 3'-phosphorothioate
  modified_base 8: mod_base = OTHER; note = 2'-deoxythymidine 3'-phosphorothioate
  modified_base 9: mod_base = OTHER; note = 5-methyl-2'-deoxycytidine 3'-phosphorothioate
  modified_base 10: mod_base = OTHER; note = 2'-deoxyadenosine 3'-phosphorothioate
  modified_base 11: mod_base = OTHER; note = 5-methyl-2'-deoxycytidine 3'-phosphorothioate
  modified_base 12..13: mod_base = OTHER; note = 2'-deoxyguanosine 3'-phosphorothioate
  modified_base 14..15: mod_base = OTHER; note = cEt adenosine 3'-phosphorothioate
  modified_base 16: mod_base = OTHER; note = cEt guanosine
cctctcctcacggaag

SEQ ID NO: 1348 - DNA, 16 bp, synthetic construct
  source 1..16: mol_type = other DNA
  modified_base 1..3: mod_base = OTHER; note = 2'-O-methoxyethyl adenosine 3'-phosphorothioate
  modified_base 4: mod_base = OTHER; note = 5-methyl-2'-deoxycytidine 3'-phosphorothioate
  modified_base 5..6: mod_base = OTHER; note = 2'-deoxythymidine 3'-phosphorothioate
  modified_base 7: mod_base = OTHER; note = 2'-deoxyguanosine 3'-phosphorothioate
  modified_base 8: mod_base = OTHER; note = 5-methyl-2'-deoxycytidine 3'-phosphorothioate
  modified_base 9: mod_base = OTHER; note = 2'-deoxythymidine 3'-phosphorothioate
  modified_base 10: mod_base = OTHER; note = 5-methyl-2'-deoxycytidine 3'-phosphorothioate
  modified_base 11: mod_base = OTHER; note = 2'-deoxyadenosine 3'-phosphorothioate
  modified_base 12: mod_base = OTHER; note = 2'-deoxyguanosine 3'-phosphorothioate
  modified_base 13: mod_base = OTHER; note = 5-methyl-2'-deoxycytidine 3'-phosphorothioate
  modified_base 14: mod_base = OTHER; note = cEt adenosine 3'-phosphorothioate
  modified_base 15: mod_base = OTHER; note = cEt guanosine 3'-phosphorothioate
  modified_base 16: mod_base = OTHER; note = cEt thymidine
aaacttgctcagcagt

SEQ ID NO: 1349 - DNA, 16 bp, synthetic construct
  source 1..16: mol_type = other DNA
  modified_base 1: mod_base = OTHER; note = 2'-O-methoxyethyl 5-methylcytidine 3'-phosphorothioate
  modified_base 2..3: mod_base = OTHER; note = 2'-O-methoxyethyl adenosine 3'-phosphorothioate
  modified_base 4: mod_base = OTHER; note = 2'-deoxyadenosine 3'-phosphorothioate
  modified_base 5: mod_base = OTHER; note = 5-methyl-2'-deoxycytidine 3'-phosphorothioate
  modified_base 6..7: mod_base = OTHER; note = 2'-deoxythymidine 3'-phosphorothioate
  modified_base 8: mod_base = OTHER; note = 2'-deoxyguanosine 3'-phosphorothioate
  modified_base 9: mod_base = OTHER; note = 5-methyl-2'-deoxycytidine 3'-phosphorothioate
  modified_base 10: mod_base = OTHER; note = 2'-deoxythymidine 3'-phosphorothioate
  modified_base 11: mod_base = OTHER; note = 5-methyl-2'-deoxycytidine 3'-phosphorothioate
  modified_base 12: mod_base = OTHER; note = 2'-deoxyadenosine 3'-phosphorothioate
  modified_base 13: mod_base = OTHER; note = 2'-deoxyguanosine 3'-phosphorothioate
  modified_base 14: mod_base = OTHER; note = cEt 5-methylcytidine 3'-phosphorothioate
  modified_base 15: mod_base = OTHER; note = cEt adenosine 3'-phosphorothioate
  modified_base 16: mod_base = OTHER; note = cEt guanosine
caaacttgctcagcag

SEQ ID NO: 1350 - DNA, 16 bp, synthetic construct
  source 1..16: mol_type = other DNA
  modified_base 1..2: mod_base = OTHER; note = 2'-O-methoxyethyl 5-methylcytidine 3'-phosphorothioate
  modified_base 3: mod_base = OTHER; note = 2'-O-methoxyethyl adenosine 3'-phosphorothioate
  modified_base 4..5: mod_base = OTHER; note = 2'-deoxyadenosine 3'-phosphorothioate
  modified_base 6: mod_base = OTHER; note = 5-methyl-2'-deoxycytidine 3'-phosphorothioate
  modified_base 7..8: mod_base = OTHER; note = 2'-deoxythymidine 3'-phosphorothioate
  modified_base 9: mod_base = OTHER; note = 2'-deoxyguanosine 3'-phosphorothioate
  modified_base 10: mod_base = OTHER; note = 5-methyl-2'-deoxycytidine 3'-phosphorothioate
  modified_base 11: mod_base = OTHER; note = 2'-deoxythymidine 3'-phosphorothioate
  modified_base 12: mod_base = OTHER; note = 5-methyl-2'-deoxycytidine 3'-phosphorothioate
  modified_base 13: mod_base = OTHER; note = 2'-deoxyadenosine 3'-phosphorothioate
  modified_base 14: mod_base = OTHER; note = cEt guanosine 3'-phosphorothioate
  modified_base 15: mod_base = OTHER; note = cEt 5-methylcytidine 3'-phosphorothioate
  modified_base 16: mod_base = OTHER; note = cEt adenosine
ccaaacttgctcagca

SEQ ID NO: 1351 - DNA, 16 bp, synthetic construct
  source 1..16: mol_type = other DNA
  modified_base 1..3: mod_base = OTHER; note = 2'-O-methoxyethyl 5-methylcytidine 3'-phosphorothioate
  modified_base 4..6: mod_base = OTHER; note = 2'-deoxyadenosine 3'-phosphorothioate
  modified_base 7: mod_base = OTHER; note = 5-methyl-2'-deoxycytidine 3'-phosphorothioate
  modified_base 8..9: mod_base = OTHER; note = 2'-deoxythymidine 3'-phosphorothioate
  modified_base 10: mod_base = OTHER; note = 2'-deoxyguanosine 3'-phosphorothioate
  modified_base 11: mod_base = OTHER; note = 5-methyl-2'-deoxycytidine 3'-phosphorothioate
  modified_base 12: mod_base = OTHER; note = 2'-deoxythymidine 3'-phosphorothioate
  modified_base 13: mod_base = OTHER; note = 5-methyl-2'-deoxycytidine 3'-phosphorothioate
  modified_base 14: mod_base = OTHER; note = cEt adenosine 3'-phosphorothioate
  modified_base 15: mod_base = OTHER; note = cEt guanosine 3'-phosphorothioate
  modified_base 16: mod_base = OTHER; note = cEt 5-methylcytidine
cccaaacttgctcagc

SEQ ID NO: 1352 - DNA, 16 bp, synthetic construct
  source 1..16: mol_type = other DNA
  modified_base 1..3: mod_base = OTHER; note = 2'-O-methoxyethyl 5-methylcytidine 3'-phosphorothioate
  modified_base 4: mod_base = OTHER; note = 5-methyl-2'-deoxycytidine 3'-phosphorothioate
  modified_base 5..7: mod_base = OTHER; note = 2'-deoxyadenosine 3'-phosphorothioate
  modified_base 8: mod_base = OTHER; note = 5-methyl-2'-deoxycytidine 3'-phosphorothioate
  modified_base 9..10: mod_base = OTHER; note = 2'-deoxythymidine 3'-phosphorothioate
  modified_base 11: mod_base = OTHER; note = 2'-deoxyguanosine 3'-phosphorothioate
  modified_base 12: mod_base = OTHER; note = 5-methyl-2'-deoxycytidine 3'-phosphorothioate
  modified_base 13: mod_base = OTHER; note = 2'-deoxythymidine 3'-phosphorothioate
  modified_base 14: mod_base = OTHER; note = cEt 5-methylcytidine 3'-phosphorothioate
  modified_base 15: mod_base = OTHER; note = cEt adenosine 3'-phosphorothioate
  modified_base 16: mod_base = OTHER; note = cEt guanosine
ccccaaacttgctcag

SEQ ID NO: 1353 - DNA, 16 bp, synthetic construct
  source 1..16: mol_type = other DNA
  modified_base 1: mod_base = OTHER; note = 2'-O-methoxyethyl thymidine 3'-phosphorothioate
  modified_base 2..3: mod_base = OTHER; note = 2'-O-methoxyethyl 5-methylcytidine 3'-phosphorothioate
  modified_base 4..5: mod_base = OTHER; note = 5-methyl-2'-deoxycytidine 3'-phosphorothioate
  modified_base 6..8: mod_base = OTHER; note = 2'-deoxyadenosine 3'-phosphorothioate
  modified_base 9: mod_base = OTHER; note = 5-methyl-2'-deoxycytidine 3'-phosphorothioate
  modified_base 10..11: mod_base = OTHER; note = 2'-deoxythymidine 3'-phosphorothioate
  modified_base 12: mod_base = OTHER; note = 2'-deoxyguanosine 3'-phosphorothioate
  modified_base 13: mod_base = OTHER; note = 5-methyl-2'-deoxycytidine 3'-phosphorothioate
  modified_base 14: mod_base = OTHER; note = cEt thymidine 3'-phosphorothioate
  modified_base 15: mod_base = OTHER; note = cEt 5-methylcytidine 3'-phosphorothioate
  modified_base 16: mod_base = OTHER; note = cEt adenosine
tccccaaacttgctca

SEQ ID NO: 1354 - DNA, 16 bp, synthetic construct
  source 1..16: mol_type = other DNA
  modified_base 1: mod_base = OTHER; note = 2'-O-methoxyethyl guanosine 3'-phosphorothioate
  modified_base 2..3: mod_base = OTHER; note = 2'-O-methoxyethyl thymidine 3'-phosphorothioate
  modified_base 4: mod_base = OTHER; note = 2'-deoxythymidine 3'-phosphorothioate
  modified_base 5: mod_base = OTHER; note = 2'-deoxyguanosine 3'-phosphorothioate
  modified_base 6: mod_base = OTHER; note = 2'-deoxyadenosine 3'-phosphorothioate
  modified_base 7: mod_base = OTHER; note = 2'-deoxythymidine 3'-phosphorothioate
  modified_base 8: mod_base = OTHER; note = 2'-deoxyguanosine 3'-phosphorothioate
  modified_base 9: mod_base = OTHER; note = 2'-deoxythymidine 3'-phosphorothioate
  modified_base 10..12: mod_base = OTHER; note = 5-methyl-2'-deoxycytidine 3'-phosphorothioate
  modified_base 13: mod_base = OTHER; note = 2'-deoxythymidine 3'-phosphorothioate
  modified_base 14: mod_base = OTHER; note = cEt guanosine 3'-phosphorothioate
  modified_base 15: mod_base = OTHER; note = cEt thymidine 3'-phosphorothioate
  modified_base 16: mod_base = OTHER; note = cEt guanosine
gtttgatgtccctgtg

SEQ ID NO: 1355 - DNA, 16 bp, synthetic construct
  source 1..16: mol_type = other DNA
  modified_base 1..2: mod_base = OTHER; note = 2'-O-methoxyethyl guanosine 3'-phosphorothioate
  modified_base 3: mod_base = OTHER; note = 2'-O-methoxyethyl thymidine 3'-phosphorothioate
  modified_base 4..5: mod_base = OTHER; note = 2'-deoxythymidine 3'-phosphorothioate
  modified_base 6: mod_base = OTHER; note = 2'-deoxyguanosine 3'-phosphorothioate
  modified_base 7: mod_base = OTHER; note = 2'-deoxyadenosine 3'-phosphorothioate
  modified_base 8: mod_base = OTHER; note = 2'-deoxythymidine 3'-phosphorothioate
  modified_base 9: mod_base = OTHER; note = 2'-deoxyguanosine 3'-phosphorothioate
  modified_base 10: mod_base = OTHER; note = 2'-deoxythymidine 3'-phosphorothioate
  modified_base 11..13: mod_base = OTHER; note = 5-methyl-2'-deoxycytidine 3'-phosphorothioate
  modified_base 14: mod_base = OTHER; note = cEt thymidine 3'-phosphorothioate
  modified_base 15: mod_base = OTHER; note = cEt guanosine 3'-phosphorothioate
  modified_base 16: mod_base = OTHER; note = cEt thymidine
ggtttgatgtccctgt

SEQ ID NO: 1356 - DNA, 16 bp, synthetic construct
  source 1..16: mol_type = other DNA
  modified_base 1..3: mod_base = OTHER; note = 2'-O-methoxyethyl guanosine 3'-phosphorothioate
  modified_base 4..6: mod_base = OTHER; note = 2'-deoxythymidine 3'-phosphorothioate
  modified_base 7: mod_base = OTHER; note = 2'-deoxyguanosine 3'-phosphorothioate
  modified_base 8: mod_base = OTHER; note = 2'-deoxyadenosine 3'-phosphorothioate
  modified_base 9: mod_base = OTHER; note = 2'-deoxythymidine 3'-phosphorothioate
  modified_base 10: mod_base = OTHER; note = 2'-deoxyguanosine 3'-phosphorothioate
  modified_base 11: mod_base = OTHER; note = 2'-deoxythymidine 3'-phosphorothioate
  modified_base 12..13: mod_base = OTHER; note = 5-methyl-2'-deoxycytidine 3'-phosphorothioate
  modified_base 14: mod_base = OTHER; note = cEt 5-methylcytidine 3'-phosphorothioate
  modified_base 15: mod_base = OTHER; note = cEt thymidine 3'-phosphorothioate
  modified_base 16: mod_base = OTHER; note = cEt guanosine
gggtttgatgtccctg

SEQ ID NO: 1357 - DNA, 16 bp, synthetic construct
  source 1..16: mol_type = other DNA
  modified_base 1: mod_base = OTHER; note = 2'-O-methoxyethyl adenosine 3'-phosphorothioate
  modified_base 3: mod_base = OTHER; note = 2'-O-methoxyethyl adenosine 3'-phosphorothioate
  modified_base 2: mod_base = OTHER; note = 2'-O-methoxyethyl 5-methylcytidine 3'-phosphorothioate
  modified_base 4: mod_base = OTHER; note = 2'-deoxyguanosine 3'-phosphorothioate
  modified_base 5..6: mod_base = OTHER; note = 5-methyl-2'-deoxycytidine 3'-phosphorothioate
  modified_base 7: mod_base = OTHER; note = 2'-deoxythymidine 3'-phosphorothioate
  modified_base 8: mod_base = OTHER; note = 2'-deoxyguanosine 3'-phosphorothioate
  modified_base 9: mod_base = OTHER; note = 5-methyl-2'-deoxycytidine 3'-phosphorothioate
  modified_base 10: mod_base = OTHER; note = 2'-deoxyadenosine 3'-phosphorothioate
  modified_base 11..12: mod_base = OTHER; note = 2'-deoxyguanosine 3'-phosphorothioate
  modified_base 13: mod_base = OTHER; note = 2'-deoxyadenosine 3'-phosphorothioate
  modified_base 14: mod_base = OTHER; note = cEt thymidine 3'-phosphorothioate
  modified_base 15: mod_base = OTHER; note = cEt 5-methylcytidine 3'-phosphorothioate
  modified_base 16: mod_base = OTHER; note = cEt thymidine
acagcctgcaggatct

SEQ ID NO: 1358 - DNA, 16 bp, synthetic construct
  source 1..16: mol_type = other DNA
  modified_base 1: mod_base = OTHER; note = 2'-O-methoxyethyl 5-methylcytidine 3'-phosphorothioate
  modified_base 3: mod_base = OTHER; note = 2'-O-methoxyethyl 5-methylcytidine 3'-phosphorothioate
  modified_base 2: mod_base = OTHER; note = 2'-O-methoxyethyl adenosine 3'-phosphorothioate
  modified_base 4: mod_base = OTHER; note = 2'-deoxyadenosine 3'-phosphorothioate
  modified_base 5: mod_base = OTHER; note = 2'-deoxyguanosine 3'-phosphorothioate
  modified_base 6..7: mod_base = OTHER; note = 5-methyl-2'-deoxycytidine 3'-phosphorothioate
  modified_base 8: mod_base = OTHER; note = 2'-deoxythymidine 3'-phosphorothioate
  modified_base 9: mod_base = OTHER; note = 2'-deoxyguanosine 3'-phosphorothioate
  modified_base 10: mod_base = OTHER; note = 5-methyl-2'-deoxycytidine 3'-phosphorothioate
  modified_base 11: mod_base = OTHER; note = 2'-deoxyadenosine 3'-phosphorothioate
  modified_base 12..13: mod_base = OTHER; note = 2'-deoxyguanosine 3'-phosphorothioate
  modified_base 14: mod_base = OTHER; note = cEt adenosine 3'-phosphorothioate
  modified_base 15: mod_base = OTHER; note = cEt thymidine 3'-phosphorothioate
  modified_base 16: mod_base = OTHER; note = cEt 5-methylcytidine
cacagcctgcaggatc

SEQ ID NO: 1359 - DNA, 16 bp, synthetic construct
  source 1..16: mol_type = other DNA
  modified_base 1..2: mod_base = OTHER; note = 2'-O-methoxyethyl 5-methylcytidine 3'-phosphorothioate
  modified_base 3: mod_base = OTHER; note = 2'-O-methoxyethyl adenosine 3'-phosphorothioate
  modified_base 4: mod_base = OTHER; note = 5-methyl-2'-deoxycytidine 3'-phosphorothioate
  modified_base 5: mod_base = OTHER; note = 2'-deoxyadenosine 3'-phosphorothioate
  modified_base 6: mod_base = OTHER; note = 2'-deoxyguanosine 3'-phosphorothioate
  modified_base 7..8: mod_base = OTHER; note = 5-methyl-2'-deoxycytidine 3'-phosphorothioate
  modified_base 9: mod_base = OTHER; note = 2'-deoxythymidine 3'-phosphorothioate
  modified_base 10: mod_base = OTHER; note = 2'-deoxyguanosine 3'-phosphorothioate
  modified_base 11: mod_base = OTHER; note = 5-methyl-2'-deoxycytidine 3'-phosphorothioate
  modified_base 12: mod_base = OTHER; note = 2'-deoxyadenosine 3'-phosphorothioate
  modified_base 13: mod_base = OTHER; note = 2'-deoxyguanosine 3'-phosphorothioate
  modified_base 14: mod_base = OTHER; note = cEt guanosine 3'-phosphorothioate
  modified_base 15: mod_base = OTHER; note = cEt adenosine 3'-phosphorothioate
  modified_base 16: mod_base = OTHER; note = cEt thymidine
ccacagcctgcaggat

SEQ ID NO: 1360 - DNA, 16 bp, synthetic construct
  source 1..16: mol_type = other DNA
  modified_base 1..3: mod_base = OTHER; note = 2'-O-methoxyethyl 5-methylcytidine 3'-phosphorothioate
  modified_base 4: mod_base = OTHER; note = 2'-deoxyadenosine 3'-phosphorothioate
  modified_base 5: mod_base = OTHER; note = 5-methyl-2'-deoxycytidine 3'-phosphorothioate
  modified_base 6: mod_base = OTHER; note = 2'-deoxyadenosine 3'-phosphorothioate
  modified_base 7: mod_base = OTHER; note = 2'-deoxyguanosine 3'-phosphorothioate
  modified_base 8..9: mod_base = OTHER; note = 5-methyl-2'-deoxycytidine 3'-phosphorothioate
  modified_base 10: mod_base = OTHER; note = 2'-deoxythymidine 3'-phosphorothioate
  modified_base 11: mod_base = OTHER; note = 2'-deoxyguanosine 3'-phosphorothioate
  modified_base 12: mod_base = OTHER; note = 5-methyl-2'-deoxycytidine 3'-phosphorothioate
  modified_base 13: mod_base = OTHER; note = 2'-deoxyadenosine 3'-phosphorothioate
  modified_base 14..15: mod_base = OTHER; note = cEt guanosine 3'-phosphorothioate
  modified_base 13: mod_base = OTHER; note = cEt adenosine
cccacagcctgcagga

SEQ ID NO: 1361 - DNA, 16 bp, synthetic construct
  source 1..16: mol_type = other DNA
  modified_base 1: mod_base = OTHER; note = 2'-O-methoxyethyl guanosine 3'-phosphorothioate
  modified_base 2..3: mod_base = OTHER; note = 2'-O-methoxyethyl 5-methylcytidine 3'-phosphorothioate
  modified_base 4: mod_base = OTHER; note = 5-methyl-2'-deoxycytidine 3'-phosphorothioate
  modified_base 5: mod_base = OTHER; note = 2'-deoxyadenosine 3'-phosphorothioate
  modified_base 6: mod_base = OTHER; note = 5-methyl-2'-deoxycytidine 3'-phosphorothioate
  modified_base 7: mod_base = OTHER; note = 2'-deoxyadenosine 3'-phosphorothioate
  modified_base 8: mod_base = OTHER; note = 2'-deoxyguanosine 3'-phosphorothioate
  modified_base 9..10: mod_base = OTHER; note = 5-methyl-2'-deoxycytidine 3'-phosphorothioate
  modified_base 11: mod_base = OTHER; note = 2'-deoxythymidine 3'-phosphorothioate
  modified_base 12: mod_base = OTHER; note = 2'-deoxyguanosine 3'-phosphorothioate
  modified_base 13: mod_base = OTHER; note = 5-methyl-2'-deoxycytidine 3'-phosphorothioate
  modified_base 14: mod_base = OTHER; note = cEt adenosine 3'-phosphorothioate
  modified_base 15: mod_base = OTHER; note = cEt guanosine 3'-phosphorothioate
  modified_base 16: mod_base = OTHER; note = cEt guanosine
gcccacagcctgcagg

SEQ ID NO: 1362 - DNA, 16 bp, synthetic construct
  source 1..16: mol_type = other DNA
  modified_base 1: mod_base = OTHER; note = 2'-O-methoxyethyl 5-methylcytidine 3'-phosphorothioate
  modified_base 3: mod_base = OTHER; note = 2'-O-methoxyethyl 5-methylcytidine 3'-phosphorothioate
  modified_base 2: mod_base = OTHER; note = 2'-O-methoxyethyl guanosine 3'-phosphorothioate
  modified_base 4..5: mod_base = OTHER; note = 5-methyl-2'-deoxycytidine 3'-phosphorothioate
  modified_base 6: mod_base = OTHER; note = 2'-deoxyadenosine 3'-phosphorothioate
  modified_base 7: mod_base = OTHER; note = 5-methyl-2'-deoxycytidine 3'-phosphorothioate
  modified_base 8: mod_base = OTHER; note = 2'-deoxyadenosine 3'-phosphorothioate
  modified_base 9: mod_base = OTHER; note = 2'-deoxyguanosine 3'-phosphorothioate
  modified_base 10..11: mod_base = OTHER; note = 5-methyl-2'-deoxycytidine 3'-phosphorothioate
  modified_base 12: mod_base = OTHER; note = 2'-deoxythymidine 3'-phosphorothioate
  modified_base 13: mod_base = OTHER; note = 2'-deoxyguanosine 3'-phosphorothioate
  modified_base 14: mod_base = OTHER; note = cEt 5-methylcytidine 3'-phosphorothioate
  modified_base 15: mod_base = OTHER; note = cEt adenosine 3'-phosphorothioate
  modified_base 16: mod_base = OTHER; note = cEt guanosine
cgcccacagcctgcag

SEQ ID NO: 1363 - DNA, 16 bp, synthetic construct
  source 1..16: mol_type = other DNA
  modified_base 1..2: mod_base = OTHER; note = 2'-O-methoxyethyl 5-methylcytidine 3'-phosphorothioate
  modified_base 3: mod_base = OTHER; note = 2'-O-methoxyethyl guanosine 3'-phosphorothioate
  modified_base 4..6: mod_base = OTHER; note = 5-methyl-2'-deoxycytidine 3'-phosphorothioate
  modified_base 7: mod_base = OTHER; note = 2'-deoxyadenosine 3'-phosphorothioate
  modified_base 8: mod_base = OTHER; note = 5-methyl-2'-deoxycytidine 3'-phosphorothioate
  modified_base 9: mod_base = OTHER; note = 2'-deoxyadenosine 3'-phosphorothioate
  modified_base 10: mod_base = OTHER; note = 2'-deoxyguanosine 3'-phosphorothioate
  modified_base 11..12: mod_base = OTHER; note = 5-methyl-2'-deoxycytidine 3'-phosphorothioate
  modified_base 13: mod_base = OTHER; note = 2'-deoxythymidine 3'-phosphorothioate
  modified_base 14: mod_base = OTHER; note = cEt guanosine 3'-phosphorothioate
  modified_base 15: mod_base = OTHER; note = cEt 5-methylcytidine 3'-phosphorothioate
  modified_base 16: mod_base = OTHER; note = cEt adenosine
ccgcccacagcctgca

SEQ ID NO: 1364 - DNA, 16 bp, synthetic construct
  source 1..16: mol_type = other DNA
  modified_base 1: mod_base = OTHER; note = 2'-O-methoxyethyl adenosine 3'-phosphorothioate
  modified_base 2..3: mod_base = OTHER; note = 2'-O-methoxyethyl 5-methylcytidine 3'-phosphorothioate
  modified_base 4: mod_base = OTHER; note = 2'-deoxyguanosine 3'-phosphorothioate
  modified_base 5..7: mod_base = OTHER; note = 5-methyl-2'-deoxycytidine 3'-phosphorothioate
  modified_base 8: mod_base = OTHER; note = 2'-deoxyadenosine 3'-phosphorothioate
  modified_base 9: mod_base = OTHER; note = 5-methyl-2'-deoxycytidine 3'-phosphorothioate
  modified_base 10: mod_base = OTHER; note = 2'-deoxyadenosine 3'-phosphorothioate
  modified_base 11: mod_base = OTHER; note = 2'-deoxyguanosine 3'-phosphorothioate
  modified_base 12..13: mod_base = OTHER; note = 5-methyl-2'-deoxycytidine 3'-phosphorothioate
  modified_base 14: mod_base = OTHER; note = cEt thymidine 3'-phosphorothioate
  modified_base 15: mod_base = OTHER; note = cEt guanosine 3'-phosphorothioate
  modified_base 16: mod_base = OTHER; note = cEt 5-methylcytidine
accgcccacagcctgc

SEQ ID NO: 1365 - DNA, 16 bp, synthetic construct
  source 1..16: mol_type = other DNA
  modified_base 1: mod_base = OTHER; note = 2'-O-methoxyethyl 5-methylcytidine 3'-phosphorothioate
  modified_base 3: mod_base = OTHER; note = 2'-O-methoxyethyl 5-methylcytidine 3'-phosphorothioate
  modified_base 2: mod_base = OTHER; note = 2'-O-methoxyethyl adenosine 3'-phosphorothioate
  modified_base 4: mod_base = OTHER; note = 5-methyl-2'-deoxycytidine 3'-phosphorothioate
  modified_base 5: mod_base = OTHER; note = 2'-deoxyguanosine 3'-phosphorothioate
  modified_base 6..8: mod_base = OTHER; note = 5-methyl-2'-deoxycytidine 3'-phosphorothioate
  modified_base 9: mod_base = OTHER; note = 2'-deoxyadenosine 3'-phosphorothioate
  modified_base 10: mod_base = OTHER; note = 5-methyl-2'-deoxycytidine 3'-phosphorothioate
  modified_base 11: mod_base = OTHER; note = 2'-deoxyadenosine 3'-phosphorothioate
  modified_base 12: mod_base = OTHER; note = 2'-deoxyguanosine 3'-phosphorothioate
  modified_base 13: mod_base = OTHER; note = 5-methyl-2'-deoxycytidine 3'-phosphorothioate
  modified_base 14: mod_base = OTHER; note = cEt 5-methylcytidine 3'-phosphorothioate
  modified_base 15: mod_base = OTHER; note = cEt thymidine 3'-phosphorothioate
  modified_base 16: mod_base = OTHER; note = cEt guanosine
caccgcccacagcctg

SEQ ID NO: 1366 - DNA, 16 bp, synthetic construct
  source 1..16: mol_type = other DNA
  modified_base 1..2: mod_base = OTHER; note = 2'-O-methoxyethyl 5-methylcytidine 3'-phosphorothioate
  modified_base 3: mod_base = OTHER; note = 2'-O-methoxyethyl adenosine 3'-phosphorothioate
  modified_base 4..5: mod_base = OTHER; note = 5-methyl-2'-deoxycytidine 3'-phosphorothioate
  modified_base 7..9: mod_base = OTHER; note = 5-methyl-2'-deoxycytidine 3'-phosphorothioate
  modified_base 6: mod_base = OTHER; note = 2'-deoxyguanosine 3'-phosphorothioate
  modified_base 10: mod_base = OTHER; note = 2'-deoxyadenosine 3'-phosphorothioate
  modified_base 11: mod_base = OTHER; note = 5-methyl-2'-deoxycytidine 3'-phosphorothioate
  modified_base 12: mod_base = OTHER; note = 2'-deoxyadenosine 3'-phosphorothioate
  modified_base 13: mod_base = OTHER; note = 2'-deoxyguanosine 3'-phosphorothioate
  modified_base 14..15: mod_base = OTHER; note = cEt 5-methylcytidine 3'-phosphorothioate
  modified_base 16: mod_base = OTHER; note = cEt thymidine
ccaccgcccacagcct

SEQ ID NO: 1367 - DNA, 16 bp, synthetic construct
  source 1..16: mol_type = other DNA
  modified_base 1..3: mod_base = OTHER; note = 2'-O-methoxyethyl 5-methylcytidine 3'-phosphorothioate
  modified_base 4: mod_base = OTHER; note = 2'-deoxyadenosine 3'-phosphorothioate
  modified_base 5..6: mod_base = OTHER; note = 5-methyl-2'-deoxycytidine 3'-phosphorothioate
  modified_base 7: mod_base = OTHER; note = 2'-deoxyguanosine 3'-phosphorothioate
  modified_base 8..10: mod_base = OTHER; note = 5-methyl-2'-deoxycytidine 3'-phosphorothioate
  modified_base 11: mod_base = OTHER; note = 2'-deoxyadenosine 3'-phosphorothioate
  modified_base 12: mod_base = OTHER; note = 5-methyl-2'-deoxycytidine 3'-phosphorothioate
  modified_base 13: mod_base = OTHER; note = 2'-deoxyadenosine 3'-phosphorothioate
  modified_base 14: mod_base = OTHER; note = cEt guanosine 3'-phosphorothioate
  modified_base 15: mod_base = OTHER; note = cEt 5-methylcytidine 3'-phosphorothioate
  modified_base 16: mod_base = OTHER; note = cEt 5-methylcytidine
cccaccgcccacagcc

SEQ ID NO: 1368 - DNA, 16 bp, synthetic construct
  source 1..16: mol_type = other DNA
  modified_base 1: mod_base = OTHER; note = 2'-O-methoxyethyl guanosine 3'-phosphorothioate
  modified_base 2..3: mod_base = OTHER; note = 2'-O-methoxyethyl 5-methylcytidine 3'-phosphorothioate
  modified_base 4: mod_base = OTHER; note = 5-methyl-2'-deoxycytidine 3'-phosphorothioate
  modified_base 5: mod_base = OTHER; note = 2'-deoxyadenosine 3'-phosphorothioate
  modified_base 6..7: mod_base = OTHER; note = 5-methyl-2'-deoxycytidine 3'-phosphorothioate
  modified_base 8: mod_base = OTHER; note = 2'-deoxyguanosine 3'-phosphorothioate
  modified_base 9..11: mod_base = OTHER; note = 5-methyl-2'-deoxycytidine 3'-phosphorothioate
  modified_base 12: mod_base = OTHER; note = 2'-deoxyadenosine 3'-phosphorothioate
  modified_base 13: mod_base = OTHER; note = 5-methyl-2'-deoxycytidine 3'-phosphorothioate
  modified_base 14: mod_base = OTHER; note = cEt adenosine 3'-phosphorothioate
  modified_base 15: mod_base = OTHER; note = cEt guanosine 3'-phosphorothioate
  modified_base 16: mod_base = OTHER; note = cEt 5-methylcytidine
gcccaccgcccacagc

SEQ ID NO: 1369 - DNA, 16 bp, synthetic construct
  source 1..16: mol_type = other DNA
  modified_base 1..2: mod_base = OTHER; note = 2'-O-methoxyethyl 5-methylcytidine 3'-phosphorothioate
  modified_base 3: mod_base = OTHER; note = 2'-O-methoxyethyl adenosine 3'-phosphorothioate
  modified_base 4..5: mod_base = OTHER; note = 2'-deoxyguanosine 3'-phosphorothioate
  modified_base 6..8: mod_base = OTHER; note = 5-methyl-2'-deoxycytidine 3'-phosphorothioate
  modified_base 9: mod_base = OTHER; note = 2'-deoxyadenosine 3'-phosphorothioate
  modified_base 10..11: mod_base = OTHER; note = 5-methyl-2'-deoxycytidine 3'-phosphorothioate
  modified_base 12: mod_base = OTHER; note = 2'-deoxyguanosine 3'-phosphorothioate
  modified_base 13: mod_base = OTHER; note = 5-methyl-2'-deoxycytidine 3'-phosphorothioate
  modified_base 14..15: mod_base = OTHER; note = cEt 5-methylcytidine 3'-phosphorothioate
  modified_base 16: mod_base = OTHER; note = cEt adenosine
ccaggcccaccgccca

SEQ ID NO: 1370 - DNA, 16 bp, synthetic construct
  source 1..16: mol_type = other DNA
  modified_base 1..3: mod_base = OTHER; note = 2'-O-methoxyethyl 5-methylcytidine 3'-phosphorothioate
  modified_base 4: mod_base = OTHER; note = 2'-deoxyadenosine 3'-phosphorothioate
  modified_base 5..6: mod_base = OTHER; note = 2'-deoxyguanosine 3'-phosphorothioate
  modified_base 7..9: mod_base = OTHER; note = 5-methyl-2'-deoxycytidine 3'-phosphorothioate
  modified_base 10: mod_base = OTHER; note = 2'-deoxyadenosine 3'-phosphorothioate
  modified_base 11..12: mod_base = OTHER; note = 5-methyl-2'-deoxycytidine 3'-phosphorothioate
  modified_base 13: mod_base = OTHER; note = 2'-deoxyguanosine 3'-phosphorothioate
  modified_base 14..15: mod_base = OTHER; note = cEt 5-methylcytidine 3'-phosphorothioate
  modified_base 16: mod_base = OTHER; note = cEt 5-methylcytidine
cccaggcccaccgccc

SEQ ID NO: 1371 - DNA, 16 bp, synthetic construct
  source 1..16: mol_type = other DNA
  modified_base 1: mod_base = OTHER; note = 2'-O-methoxyethyl thymidine 3'-phosphorothioate
  modified_base 2..3: mod_base = OTHER; note = 2'-O-methoxyethyl 5-methylcytidine 3'-phosphorothioate
  modified_base 4: mod_base = OTHER; note = 5-methyl-2'-deoxycytidine 3'-phosphorothioate
  modified_base 5: mod_base = OTHER; note = 2'-deoxyadenosine 3'-phosphorothioate
  modified_base 6..7: mod_base = OTHER; note = 2'-deoxyguanosine 3'-phosphorothioate
  modified_base 8..10: mod_base = OTHER; note = 5-methyl-2'-deoxycytidine 3'-phosphorothioate
  modified_base 11: mod_base = OTHER; note = 2'-deoxyadenosine 3'-phosphorothioate
  modified_base 12..13: mod_base = OTHER; note = 5-methyl-2'-deoxycytidine 3'-phosphorothioate
  modified_base 14: mod_base = OTHER; note = cEt guanosine 3'-phosphorothioate
  modified_base 15: mod_base = OTHER; note = cEt 5-methylcytidine 3'-phosphorothioate
  modified_base 16: mod_base = OTHER; note = cEt 5-methylcytidine
tcccaggcccaccgcc

SEQ ID NO: 1372 - DNA, 16 bp, synthetic construct
  source 1..16: mol_type = other DNA
  modified_base 1: mod_base = OTHER; note = 2'-O-methoxyethyl thymidine 3'-phosphorothioate
  modified_base 2: mod_base = OTHER; note = 2'-O-methoxyethyl guanosine 3'-phosphorothioate
  modified_base 3: mod_base = OTHER; note = 2'-O-methoxyethyl 5-methylcytidine 3'-phosphorothioate
  modified_base 4: mod_base = OTHER; note = 5-methyl-2'-deoxycytidine 3'-phosphorothioate
  modified_base 5: mod_base = OTHER; note = 2'-deoxythymidine 3'-phosphorothioate
  modified_base 6: mod_base = OTHER; note = 2'-deoxyguanosine 3'-phosphorothioate
  modified_base 7: mod_base = OTHER; note = 2'-deoxythymidine 3'-phosphorothioate
  modified_base 8..10: mod_base = OTHER; note = 5-methyl-2'-deoxycytidine 3'-phosphorothioate
  modified_base 11: mod_base = OTHER; note = 2'-deoxyadenosine 3'-phosphorothioate
  modified_base 12..13: mod_base = OTHER; note = 2'-deoxyguanosine 3'-phosphorothioate
  modified_base 14..15: mod_base = OTHER; note = cEt 5-methylcytidine 3'-phosphorothioate
  modified_base 16: mod_base = OTHER; note = cEt 5-methylcytidine
tgcctgtcccaggccc

SEQ ID NO: 1373 - DNA, 16 bp, synthetic construct
  source 1..16: mol_type = other DNA
  modified_base 1: mod_base = OTHER; note = 2'-O-methoxyethyl 5-methylcytidine 3'-phosphorothioate
  modified_base 2: mod_base = OTHER; note = 2'-O-methoxyethyl thymidine 3'-phosphorothioate
  modified_base 3: mod_base = OTHER; note = 2'-O-methoxyethyl guanosine 3'-phosphorothioate
  modified_base 4..5: mod_base = OTHER; note = 5-methyl-2'-deoxycytidine 3'-phosphorothioate
  modified_base 6: mod_base = OTHER; note = 2'-deoxythymidine 3'-phosphorothioate
  modified_base 7: mod_base = OTHER; note = 2'-deoxyguanosine 3'-phosphorothioate
  modified_base 8: mod_base = OTHER; note = 2'-deoxythymidine 3'-phosphorothioate
  modified_base 9..11: mod_base = OTHER; note = 5-methyl-2'-deoxycytidine 3'-phosphorothioate
  modified_base 12: mod_base = OTHER; note = 2'-deoxyadenosine 3'-phosphorothioate
  modified_base 13: mod_base = OTHER; note = 2'-deoxyguanosine 3'-phosphorothioate
  modified_base 14: mod_base = OTHER; note = cEt guanosine 3'-phosphorothioate
  modified_base 15: mod_base = OTHER; note = cEt 5-methylcytidine 3'-phosphorothioate
  modified_base 16: mod_base = OTHER; note = cEt 5-methylcytidine
ctgcctgtcccaggcc

SEQ ID NO: 1374 - DNA, 16 bp, synthetic construct
  source 1..16: mol_type = other DNA
  modified_base 1: mod_base = OTHER; note = 2'-O-methoxyethyl guanosine 3'-phosphorothioate
  modified_base 2: mod_base = OTHER; note = 2'-O-methoxyethyl 5-methylcytidine 3'-phosphorothioate
  modified_base 3: mod_base = OTHER; note = 2'-O-methoxyethyl thymidine 3'-phosphorothioate
  modified_base 4: mod_base = OTHER; note = 2'-deoxyguanosine 3'-phosphorothioate
  modified_base 5..6: mod_base = OTHER; note = 5-methyl-2'-deoxycytidine 3'-phosphorothioate
  modified_base 7: mod_base = OTHER; note = 2'-deoxythymidine 3'-phosphorothioate
  modified_base 8: mod_base = OTHER; note = 2'-deoxyguanosine 3'-phosphorothioate
  modified_base 9: mod_base = OTHER; note = 2'-deoxythymidine 3'-phosphorothioate
  modified_base 10..12: mod_base = OTHER; note = 5-methyl-2'-deoxycytidine 3'-phosphorothioate
  modified_base 13: mod_base = OTHER; note = 2'-deoxyadenosine 3'-phosphorothioate
  modified_base 14..15: mod_base = OTHER; note = cEt guanosine 3'-phosphorothioate
  modified_base 16: mod_base = OTHER; note = cEt 5-methylcytidine
gctgcctgtcccaggc

SEQ ID NO: 1375 - DNA, 16 bp, synthetic construct
  source 1..16: mol_type = other DNA
  modified_base 1..2: mod_base = OTHER; note = 2'-O-methoxyethyl guanosine 3'-phosphorothioate
  modified_base 3: mod_base = OTHER; note = 2'-O-methoxyethyl thymidine 3'-phosphorothioate
  modified_base 4..5: mod_base = OTHER; note = 2'-deoxyguanosine 3'-phosphorothioate
  modified_base 6: mod_base = OTHER; note = 5-methyl-2'-deoxycytidine 3'-phosphorothioate
  modified_base 7: mod_base = OTHER; note = 2'-deoxyadenosine 3'-phosphorothioate
  modified_base 8..9: mod_base = OTHER; note = 5-methyl-2'-deoxycytidine 3'-phosphorothioate
  modified_base 10..11: mod_base = OTHER; note = 2'-deoxythymidine 3'-phosphorothioate
  modified_base 12: mod_base = OTHER; note = 5-methyl-2'-deoxycytidine 3'-phosphorothioate
  modified_base 13: mod_base = OTHER; note = 2'-deoxyguanosine 3'-phosphorothioate
  modified_base 14..15: mod_base = OTHER; note = cEt adenosine 3'-phosphorothioate
  modified_base 16: mod_base = OTHER; note = cEt adenosine
ggtggcaccttcgaaa

SEQ ID NO: 1376 - DNA, 16 bp, synthetic construct
  source 1..16: mol_type = other DNA
  modified_base 1: mod_base = OTHER; note = 2'-O-methoxyethyl 5-methylcytidine 3'-phosphorothioate
  modified_base 2..3: mod_base = OTHER; note = 2'-O-methoxyethyl guanosine 3'-phosphorothioate
  modified_base 4: mod_base = OTHER; note = 2'-deoxythymidine 3'-phosphorothioate
  modified_base 5..6: mod_base = OTHER; note = 2'-deoxyguanosine 3'-phosphorothioate
  modified_base 7: mod_base = OTHER; note = 5-methyl-2'-deoxycytidine 3'-phosphorothioate
  modified_base 8: mod_base = OTHER; note = 2'-deoxyadenosine 3'-phosphorothioate
  modified_base 9..10: mod_base = OTHER; note = 5-methyl-2'-deoxycytidine 3'-phosphorothioate
  modified_base 11..12: mod_base = OTHER; note = 2'-deoxythymidine 3'-phosphorothioate
  modified_base 13: mod_base = OTHER; note = 5-methyl-2'-deoxycytidine 3'-phosphorothioate
  modified_base 14: mod_base = OTHER; note = cEt guanosine 3'-phosphorothioate
  modified_base 15: mod_base = OTHER; note = cEt adenosine 3'-phosphorothioate
  modified_base 16: mod_base = OTHER; note = cEt adenosine
cggtggcaccttcgaa

SEQ ID NO: 1377 - DNA, 16 bp, synthetic construct
  source 1..16: mol_type = other DNA
  modified_base 1: mod_base = OTHER; note = 2'-O-methoxyethyl thymidine 3'-phosphorothioate
  modified_base 2: mod_base = OTHER; note = 2'-O-methoxyethyl 5-methylcytidine 3'-phosphorothioate
  modified_base 3: mod_base = OTHER; note = 2'-O-methoxyethyl guanosine 3'-phosphorothioate
  modified_base 4: mod_base = OTHER; note = 2'-deoxyguanosine 3'-phosphorothioate
  modified_base 5: mod_base = OTHER; note = 2'-deoxythymidine 3'-phosphorothioate
  modified_base 6..7: mod_base = OTHER; note = 2'-deoxyguanosine 3'-phosphorothioate
  modified_base 8: mod_base = OTHER; note = 5-methyl-2'-deoxycytidine 3'-phosphorothioate
  modified_base 9: mod_base = OTHER; note = 2'-deoxyadenosine 3'-phosphorothioate
  modified_base 10..11: mod_base = OTHER; note = 5-methyl-2'-deoxycytidine 3'-phosphorothioate
  modified_base 12..13: mod_base = OTHER; note = 2'-deoxythymidine 3'-phosphorothioate
  modified_base 14: mod_base = OTHER; note = cEt 5-methylcytidine 3'-phosphorothioate
  modified_base 15: mod_base = OTHER; note = cEt guanosine 3'-phosphorothioate
  modified_base 16: mod_base = OTHER; note = cEt adenosine
tcggtggcaccttcga

SEQ ID NO: 1378 - DNA, 16 bp, synthetic construct
  source 1..16: mol_type = other DNA
  modified_base 1: mod_base = OTHER; note = 2'-O-methoxyethyl adenosine 3'-phosphorothioate
  modified_base 2: mod_base = OTHER; note = 2'-O-methoxyethyl guanosine 3'-phosphorothioate
  modified_base 3: mod_base = OTHER; note = 2'-O-methoxyethyl thymidine 3'-phosphorothioate
  modified_base 4: mod_base = OTHER; note = 2'-deoxyguanosine 3'-phosphorothioate
  modified_base 5: mod_base = OTHER; note = 2'-deoxyadenosine 3'-phosphorothioate
  modified_base 6: mod_base = OTHER; note = 2'-deoxyguanosine 3'-phosphorothioate
  modified_base 7..9: mod_base = OTHER; note = 5-methyl-2'-deoxycytidine 3'-phosphorothioate
  modified_base 10: mod_base = OTHER; note = 2'-deoxyguanosine 3'-phosphorothioate
  modified_base 11: mod_base = OTHER; note = 2'-deoxythymidine 3'-phosphorothioate
  modified_base 12..13: mod_base = OTHER; note = 5-methyl-2'-deoxycytidine 3'-phosphorothioate
  modified_base 14: mod_base = OTHER; note = cEt thymidine 3'-phosphorothioate
  modified_base 15: mod_base = OTHER; note = cEt 5-methylcytidine 3'-phosphorothioate
  modified_base 16: mod_base = OTHER; note = cEt 5-methylcytidine
agtgagcccgtcctcc

SEQ ID NO: 1379 - DNA, 16 bp, synthetic construct
  source 1..16: mol_type = other DNA
  modified_base 1: mod_base = OTHER; note = 2'-O-methoxyethyl 5-methylcytidine 3'-phosphorothioate
  modified_base 2: mod_base = OTHER; note = 2'-O-methoxyethyl adenosine 3'-phosphorothioate
  modified_base 3: mod_base = OTHER; note = 2'-O-methoxyethyl guanosine 3'-phosphorothioate
  modified_base 4: mod_base = OTHER; note = 2'-deoxythymidine 3'-phosphorothioate
  modified_base 5: mod_base = OTHER; note = 2'-deoxyguanosine 3'-phosphorothioate
  modified_base 6: mod_base = OTHER; note = 2'-deoxyadenosine 3'-phosphorothioate
  modified_base 7: mod_base = OTHER; note = 2'-deoxyguanosine 3'-phosphorothioate
  modified_base 8..10: mod_base = OTHER; note = 5-methyl-2'-deoxycytidine 3'-phosphorothioate
  modified_base 11: mod_base = OTHER; note = 2'-deoxyguanosine 3'-phosphorothioate
  modified_base 12: mod_base = OTHER; note = 2'-deoxythymidine 3'-phosphorothioate
  modified_base 13: mod_base = OTHER; note = 5-methyl-2'-deoxycytidine 3'-phosphorothioate
  modified_base 14: mod_base = OTHER; note = cEt 5-methylcytidine 3'-phosphorothioate
  modified_base 15: mod_base = OTHER; note = cEt thymidine 3'-phosphorothioate
  modified_base 16: mod_base = OTHER; note = cEt 5-methylcytidine
cagtgagcccgtcctc

SEQ ID NO: 1380 - DNA, 16 bp, synthetic construct
  source 1..16: mol_type = other DNA
  modified_base 1: mod_base = OTHER; note = 2'-O-methoxyethyl guanosine 3'-phosphorothioate
  modified_base 2: mod_base = OTHER; note = 2'-O-methoxyethyl 5-methylcytidine 3'-phosphorothioate
  modified_base 3: mod_base = OTHER; note = 2'-O-methoxyethyl adenosine 3'-phosphorothioate
  modified_base 4: mod_base = OTHER; note = 2'-deoxyguanosine 3'-phosphorothioate
  modified_base 6: mod_base = OTHER; note = 2'-deoxyguanosine 3'-phosphorothioate
  modified_base 5: mod_base = OTHER; note = 2'-deoxythymidine 3'-phosphorothioate
  modified_base 7: mod_base = OTHER; note = 2'-deoxyadenosine 3'-phosphorothioate
  modified_base 8: mod_base = OTHER; note = 2'-deoxyguanosine 3'-phosphorothioate
  modified_base 9..11: mod_base = OTHER; note = 5-methyl-2'-deoxycytidine 3'-phosphorothioate
  modified_base 12: mod_base = OTHER; note = 2'-deoxyguanosine 3'-phosphorothioate
  modified_base 13: mod_base = OTHER; note = 2'-deoxythymidine 3'-phosphorothioate
  modified_base 14..15: mod_base = OTHER; note = cEt 5-methylcytidine 3'-phosphorothioate
  modified_base 16: mod_base = OTHER; note = cEt thymidine
gcagtgagcccgtcct

SEQ ID NO: 1381 - DNA, 16 bp, synthetic construct
  source 1..16: mol_type = other DNA
  modified_base 1: mod_base = OTHER; note = 2'-O-methoxyethyl thymidine 3'-phosphorothioate
  modified_base 2..3: mod_base = OTHER; note = 2'-O-methoxyethyl 5-methylcytidine 3'-phosphorothioate
  modified_base 4: mod_base = OTHER; note = 5-methyl-2'-deoxycytidine 3'-phosphorothioate
  modified_base 5: mod_base = OTHER; note = 2'-deoxyguanosine 3'-phosphorothioate
  modified_base 6..7: mod_base = OTHER; note = 2'-deoxyadenosine 3'-phosphorothioate
  modified_base 8: mod_base = OTHER; note = 2'-deoxythymidine 3'-phosphorothioate
  modified_base 9: mod_base = OTHER; note = 2'-deoxyguanosine 3'-phosphorothioate
  modified_base 10: mod_base = OTHER; note = 2'-deoxythymidine 3'-phosphorothioate
  modified_base 11..12: mod_base = OTHER; note = 5-methyl-2'-deoxycytidine 3'-phosphorothioate
  modified_base 13: mod_base = OTHER; note = 2'-deoxyguanosine 3'-phosphorothioate
  modified_base 14: mod_base = OTHER; note = cEt adenosine 3'-phosphorothioate
  modified_base 15: mod_base = OTHER; note = cEt 5-methylcytidine 3'-phosphorothioate
  modified_base 16: mod_base = OTHER; note = cEt adenosine
tcccgaatgtccgaca

SEQ ID NO: 1382 - DNA, 16 bp, synthetic construct
  source 1..16: mol_type = other DNA
  modified_base 1..2: mod_base = OTHER; note = 2'-O-methoxyethyl thymidine 3'-phosphorothioate
  modified_base 3: mod_base = OTHER; note = 2'-O-methoxyethyl 5-methylcytidine 3'-phosphorothioate
  modified_base 4..5: mod_base = OTHER; note = 5-methyl-2'-deoxycytidine 3'-phosphorothioate
  modified_base 6: mod_base = OTHER; note = 2'-deoxyguanosine 3'-phosphorothioate
  modified_base 7..8: mod_base = OTHER; note = 2'-deoxyadenosine 3'-phosphorothioate
  modified_base 9: mod_base = OTHER; note = 2'-deoxythymidine 3'-phosphorothioate
  modified_base 10: mod_base = OTHER; note = 2'-deoxyguanosine 3'-phosphorothioate
  modified_base 11: mod_base = OTHER; note = 2'-deoxythymidine 3'-phosphorothioate
  modified_base 12..13: mod_base = OTHER; note = 5-methyl-2'-deoxycytidine 3'-phosphorothioate
  modified_base 14: mod_base = OTHER; note = cEt guanosine 3'-phosphorothioate
  modified_base 15: mod_base = OTHER; note = cEt adenosine 3'-phosphorothioate
  modified_base 16: mod_base = OTHER; note = cEt 5-methylcytidine
ttcccgaatgtccgac

SEQ ID NO: 1383 - DNA, 16 bp, synthetic construct
  source 1..16: mol_type = other DNA
  modified_base 1: mod_base = OTHER; note = 2'-O-methoxyethyl 5-methylcytidine 3'-phosphorothioate
  modified_base 2..3: mod_base = OTHER; note = 2'-O-methoxyethyl thymidine 3'-phosphorothioate
  modified_base 4..6: mod_base = OTHER; note = 5-methyl-2'-deoxycytidine 3'-phosphorothioate
  modified_base 7: mod_base = OTHER; note = 2'-deoxyguanosine 3'-phosphorothioate
  modified_base 8..9: mod_base = OTHER; note = 2'-deoxyadenosine 3'-phosphorothioate
  modified_base 10: mod_base = OTHER; note = 2'-deoxythymidine 3'-phosphorothioate
  modified_base 11: mod_base = OTHER; note = 2'-deoxyguanosine 3'-phosphorothioate
  modified_base 12: mod_base = OTHER; note = 2'-deoxythymidine 3'-phosphorothioate
  modified_base 13: mod_base = OTHER; note = 5-methyl-2'-deoxycytidine 3'-phosphorothioate
  modified_base 14: mod_base = OTHER; note = cEt 5-methylcytidine 3'-phosphorothioate
  modified_base 15: mod_base = OTHER; note = cEt guanosine 3'-phosphorothioate
  modified_base 16: mod_base = OTHER; note = cEt adenosine
cttcccgaatgtccga

SEQ ID NO: 1384 - DNA, 16 bp, synthetic construct
  source 1..16: mol_type = other DNA
  modified_base 1..2: mod_base = OTHER; note = 2'-O-methoxyethyl 5-methylcytidine 3'-phosphorothioate
  modified_base 3: mod_base = OTHER; note = 2'-O-methoxyethyl thymidine 3'-phosphorothioate
  modified_base 4: mod_base = OTHER; note = 2'-deoxythymidine 3'-phosphorothioate
  modified_base 5..7: mod_base = OTHER; note = 5-methyl-2'-deoxycytidine 3'-phosphorothioate
  modified_base 8: mod_base = OTHER; note = 2'-deoxyguanosine 3'-phosphorothioate
  modified_base 9..10: mod_base = OTHER; note = 2'-deoxyadenosine 3'-phosphorothioate
  modified_base 11: mod_base = OTHER; note = 2'-deoxythymidine 3'-phosphorothioate
  modified_base 12: mod_base = OTHER; note = 2'-deoxyguanosine 3'-phosphorothioate
  modified_base 13: mod_base = OTHER; note = 2'-deoxythymidine 3'-phosphorothioate
  modified_base 14..15: mod_base = OTHER; note = cEt 5-methylcytidine 3'-phosphorothioate
  modified_base 16: mod_base = OTHER; note = cEt guanosine
ccttcccgaatgtccg

SEQ ID NO: 1385 - DNA, 16 bp, synthetic construct
  source 1..16: mol_type = other DNA
  modified_base 1: mod_base = OTHER; note = 2'-O-methoxyethyl adenosine 3'-phosphorothioate
  modified_base 2..3: mod_base = OTHER; note = 2'-O-methoxyethyl 5-methylcytidine 3'-phosphorothioate
  modified_base 4..5: mod_base = OTHER; note = 2'-deoxythymidine 3'-phosphorothioate
  modified_base 6..8: mod_base = OTHER; note = 5-methyl-2'-deoxycytidine 3'-phosphorothioate
  modified_base 9: mod_base = OTHER; note = 2'-deoxyguanosine 3'-phosphorothioate
  modified_base 10..11: mod_base = OTHER; note = 2'-deoxyadenosine 3'-phosphorothioate
  modified_base 12: mod_base = OTHER; note = 2'-deoxythymidine 3'-phosphorothioate
  modified_base 13: mod_base = OTHER; note = 2'-deoxyguanosine 3'-phosphorothioate
  modified_base 14: mod_base = OTHER; note = cEt thymidine 3'-phosphorothioate
  modified_base 15: mod_base = OTHER; note = cEt 5-methylcytidine 3'-phosphorothioate
  modified_base 16: mod_base = OTHER; note = cEt 5-methylcytidine
accttcccgaatgtcc

SEQ ID NO: 1386 - DNA, 16 bp, synthetic construct
  source 1..16: mol_type = other DNA
  modified_base 1: mod_base = OTHER; note = 2'-O-methoxyethyl 5-methylcytidine 3'-phosphorothioate
  modified_base 3: mod_base = OTHER; note = 2'-O-methoxyethyl 5-methylcytidine 3'-phosphorothioate
  modified_base 2: mod_base = OTHER; note = 2'-O-methoxyethyl adenosine 3'-phosphorothioate
  modified_base 4: mod_base = OTHER; note = 5-methyl-2'-deoxycytidine 3'-phosphorothioate
  modified_base 5..6: mod_base = OTHER; note = 2'-deoxythymidine 3'-phosphorothioate
  modified_base 7..9: mod_base = OTHER; note = 5-methyl-2'-deoxycytidine 3'-phosphorothioate
  modified_base 10: mod_base = OTHER; note = 2'-deoxyguanosine 3'-phosphorothioate
  modified_base 11..12: mod_base = OTHER; note = 2'-deoxyadenosine 3'-phosphorothioate
  modified_base 13: mod_base = OTHER; note = 2'-deoxythymidine 3'-phosphorothioate
  modified_base 14: mod_base = OTHER; note = cEt guanosine 3'-phosphorothioate
  modified_base 15: mod_base = OTHER; note = cEt thymidine 3'-phosphorothioate
  modified_base 16: mod_base = OTHER; note = cEt 5-methylcytidine
caccttcccgaatgtc

SEQ ID NO: 1387 - DNA, 16 bp, synthetic construct
  source 1..16: mol_type = other DNA
  modified_base 1: mod_base = OTHER; note = 2'-O-methoxyethyl guanosine 3'-phosphorothioate
  modified_base 2: mod_base = OTHER; note = 2'-O-methoxyethyl 5-methylcytidine 3'-phosphorothioate
  modified_base 3: mod_base = OTHER; note = 2'-O-methoxyethyl adenosine 3'-phosphorothioate
  modified_base 4..5: mod_base = OTHER; note = 5-methyl-2'-deoxycytidine 3'-phosphorothioate
  modified_base 6..7: mod_base = OTHER; note = 2'-deoxythymidine 3'-phosphorothioate
  modified_base 8..10: mod_base = OTHER; note = 5-methyl-2'-deoxycytidine 3'-phosphorothioate
  modified_base 11: mod_base = OTHER; note = 2'-deoxyguanosine 3'-phosphorothioate
  modified_base 12..13: mod_base = OTHER; note = 2'-deoxyadenosine 3'-phosphorothioate
  modified_base 14: mod_base = OTHER; note = cEt thymidine 3'-phosphorothioate
  modified_base 15: mod_base = OTHER; note = cEt guanosine 3'-phosphorothioate
  modified_base 16: mod_base = OTHER; note = cEt thymidine
gcaccttcccgaatgt

SEQ ID NO: 1388 - DNA, 16 bp, synthetic construct
  source 1..16: mol_type = other DNA
  modified_base 1: mod_base = OTHER; note = 2'-O-methoxyethyl 5-methylcytidine 3'-phosphorothioate
  modified_base 2: mod_base = OTHER; note = 2'-O-methoxyethyl guanosine 3'-phosphorothioate
  modified_base 3: mod_base = OTHER; note = 2'-O-methoxyethyl 5-methylcytidine 3'-phosphorothioate
  modified_base 4: mod_base = OTHER; note = 2'-deoxyadenosine 3'-phosphorothioate
  modified_base 5..6: mod_base = OTHER; note = 5-methyl-2'-deoxycytidine 3'-phosphorothioate
  modified_base 7..8: mod_base = OTHER; note = 2'-deoxythymidine 3'-phosphorothioate
  modified_base 9..11: mod_base = OTHER; note = 5-methyl-2'-deoxycytidine 3'-phosphorothioate
  modified_base 12: mod_base = OTHER; note = 2'-deoxyguanosine 3'-phosphorothioate
  modified_base 13: mod_base = OTHER; note = 2'-deoxyadenosine 3'-phosphorothioate
  modified_base 14: mod_base = OTHER; note = cEt adenosine 3'-phosphorothioate
  modified_base 15: mod_base = OTHER; note = cEt thymidine 3'-phosphorothioate
  modified_base 16: mod_base = OTHER; note = cEt guanosine
cgcaccttcccgaatg

SEQ ID NO: 1389 - DNA, 16 bp, synthetic construct
  source 1..16: mol_type = other DNA
  modified_base 1: mod_base = OTHER; note = 2'-O-methoxyethyl adenosine 3'-phosphorothioate
  modified_base 2: mod_base = OTHER; note = 2'-O-methoxyethyl thymidine 3'-phosphorothioate
  modified_base 3: mod_base = OTHER; note = 2'-O-methoxyethyl 5-methylcytidine 3'-phosphorothioate
  modified_base 4: mod_base = OTHER; note = 5-methyl-2'-deoxycytidine 3'-phosphorothioate
  modified_base 5: mod_base = OTHER; note = 2'-deoxyguanosine 3'-phosphorothioate
  modified_base 6: mod_base = OTHER; note = 5-methyl-2'-deoxycytidine 3'-phosphorothioate
  modified_base 7: mod_base = OTHER; note = 2'-deoxythymidine 3'-phosphorothioate
  modified_base 8..9: mod_base = OTHER; note = 5-methyl-2'-deoxycytidine 3'-phosphorothioate
  modified_base 10: mod_base = OTHER; note = 2'-deoxythymidine 3'-phosphorothioate
  modified_base 11: mod_base = OTHER; note = 2'-deoxyguanosine 3'-phosphorothioate
  modified_base 12: mod_base = OTHER; note = 5-methyl-2'-deoxycytidine 3'-phosphorothioate
  modified_base 13: mod_base = OTHER; note = 2'-deoxyadenosine 3'-phosphorothioate
  modified_base 14: mod_base = OTHER; note = cEt adenosine 3'-phosphorothioate
  modified_base 15: mod_base = OTHER; note = cEt 5-methylcytidine 3'-phosphorothioate
  modified_base 16: mod_base = OTHER; note = cEt thymidine
atccgctcctgcaact

SEQ ID NO: 1390 - DNA, 16 bp, synthetic construct
  source 1..16: mol_type = other DNA
  modified_base 1: mod_base = OTHER; note = 2'-O-methoxyethyl 5-methylcytidine 3'-phosphorothioate
  modified_base 2: mod_base = OTHER; note = 2'-O-methoxyethyl adenosine 3'-phosphorothioate
  modified_base 3: mod_base = OTHER; note = 2'-O-methoxyethyl thymidine 3'-phosphorothioate
  modified_base 4..5: mod_base = OTHER; note = 5-methyl-2'-deoxycytidine 3'-phosphorothioate
  modified_base 6: mod_base = OTHER; note = 2'-deoxyguanosine 3'-phosphorothioate
  modified_base 7: mod_base = OTHER; note = 5-methyl-2'-deoxycytidine 3'-phosphorothioate
  modified_base 8: mod_base = OTHER; note = 2'-deoxythymidine 3'-phosphorothioate
  modified_base 9..10: mod_base = OTHER; note = 5-methyl-2'-deoxycytidine 3'-phosphorothioate
  modified_base 11: mod_base = OTHER; note = 2'-deoxythymidine 3'-phosphorothioate
  modified_base 12: mod_base = OTHER; note = 2'-deoxyguanosine 3'-phosphorothioate
  modified_base 13: mod_base = OTHER; note = 5-methyl-2'-deoxycytidine 3'-phosphorothioate
  modified_base 14..15: mod_base = OTHER; note = cEt adenosine 3'-phosphorothioate
  modified_base 16: mod_base = OTHER; note = cEt 5-methylcytidine
catccgctcctgcaac

SEQ ID NO: 1391 - DNA, 16 bp, synthetic construct
  source 1..16: mol_type = other DNA
  modified_base 1..2: mod_base = OTHER; note = 2'-O-methoxyethyl 5-methylcytidine 3'-phosphorothioate
  modified_base 3: mod_base = OTHER; note = 2'-O-methoxyethyl adenosine 3'-phosphorothioate
  modified_base 4: mod_base = OTHER; note = 2'-deoxythymidine 3'-phosphorothioate
  modified_base 5..6: mod_base = OTHER; note = 5-methyl-2'-deoxycytidine 3'-phosphorothioate
  modified_base 7: mod_base = OTHER; note = 2'-deoxyguanosine 3'-phosphorothioate
  modified_base 8: mod_base = OTHER; note = 5-methyl-2'-deoxycytidine 3'-phosphorothioate
  modified_base 9: mod_base = OTHER; note = 2'-deoxythymidine 3'-phosphorothioate
  modified_base 10..11: mod_base = OTHER; note = 5-methyl-2'-deoxycytidine 3'-phosphorothioate
  modified_base 12: mod_base = OTHER; note = 2'-deoxythymidine 3'-phosphorothioate
  modified_base 13: mod_base = OTHER; note = 2'-deoxyguanosine 3'-phosphorothioate
  modified_base 14: mod_base = OTHER; note = cEt 5-methylcytidine 3'-phosphorothioate
  modified_base 15: mod_base = OTHER; note = cEt adenosine 3'-phosphorothioate
  modified_base 16: mod_base = OTHER; note = cEt adenosine
ccatccgctcctgcaa

SEQ ID NO: 1392 - DNA, 16 bp, synthetic construct
  source 1..16: mol_type = other DNA
  modified_base 1: mod_base = OTHER; note = 2'-O-methoxyethyl guanosine 3'-phosphorothioate
  modified_base 2: mod_base = OTHER; note = 2'-O-methoxyethyl 5-methylcytidine 3'-phosphorothioate
  modified_base 3: mod_base = OTHER; note = 2'-O-methoxyethyl thymidine 3'-phosphorothioate
  modified_base 4..6: mod_base = OTHER; note = 5-methyl-2'-deoxycytidine 3'-phosphorothioate
  modified_base 7: mod_base = OTHER; note = 2'-deoxythymidine 3'-phosphorothioate
  modified_base 8: mod_base = OTHER; note = 5-methyl-2'-deoxycytidine 3'-phosphorothioate
  modified_base 9: mod_base = OTHER; note = 2'-deoxythymidine 3'-phosphorothioate
  modified_base 10: mod_base = OTHER; note = 2'-deoxyguanosine 3'-phosphorothioate
  modified_base 11..12: mod_base = OTHER; note = 5-methyl-2'-deoxycytidine 3'-phosphorothioate
  modified_base 13: mod_base = OTHER; note = 2'-deoxythymidine 3'-phosphorothioate
  modified_base 14: mod_base = OTHER; note = cEt guanosine 3'-phosphorothioate
  modified_base 15: mod_base = OTHER; note = cEt 5-methylcytidine 3'-phosphorothioate
  modified_base 16: mod_base = OTHER; note = cEt adenosine
gctccctctgcctgca

SEQ ID NO: 1393 - DNA, 16 bp, synthetic construct
  source 1..16: mol_type = other DNA
  modified_base 1: mod_base = OTHER; note = 2'-O-methoxyethyl adenosine 3'-phosphorothioate
  modified_base 2..3: mod_base = OTHER; note = 2'-O-methoxyethyl guanosine 3'-phosphorothioate
  modified_base 4: mod_base = OTHER; note = 2'-deoxythymidine 3'-phosphorothioate
  modified_base 5..6: mod_base = OTHER; note = 2'-deoxyguanosine 3'-phosphorothioate
  modified_base 7: mod_base = OTHER; note = 2'-deoxyadenosine 3'-phosphorothioate
  modified_base 8: mod_base = OTHER; note = 2'-deoxythymidine 3'-phosphorothioate
  modified_base 9..10: mod_base = OTHER; note = 5-methyl-2'-deoxycytidine 3'-phosphorothioate
  modified_base 11: mod_base = OTHER; note = 2'-deoxyguanosine 3'-phosphorothioate
  modified_base 12: mod_base = OTHER; note = 2'-deoxythymidine 3'-phosphorothioate
  modified_base 13: mod_base = OTHER; note = 2'-deoxyguanosine 3'-phosphorothioate
  modified_base 14: mod_base = OTHER; note = cEt guanosine 3'-phosphorothioate
  modified_base 15: mod_base = OTHER; note = cEt 5-methylcytidine 3'-phosphorothioate
  modified_base 16: mod_base = OTHER; note = cEt 5-methylcytidine
aggtggatccgtggcc

SEQ ID NO: 1394 - DNA, 16 bp, synthetic construct
  source 1..16: mol_type = other DNA
  modified_base 1..3: mod_base = OTHER; note = 2'-O-methoxyethyl guanosine 3'-phosphorothioate
  modified_base 4..5: mod_base = OTHER; note = 2'-deoxyadenosine 3'-phosphorothioate
  modified_base 6..7: mod_base = OTHER; note = 2'-deoxyguanosine 3'-phosphorothioate
  modified_base 8: mod_base = OTHER; note = 2'-deoxythymidine 3'-phosphorothioate
  modified_base 9..10: mod_base = OTHER; note = 2'-deoxyguanosine 3'-phosphorothioate
  modified_base 11: mod_base = OTHER; note = 2'-deoxyadenosine 3'-phosphorothioate
  modified_base 12: mod_base = OTHER; note = 2'-deoxythymidine 3'-phosphorothioate
  modified_base 13: mod_base = OTHER; note = 5-methyl-2'-deoxycytidine 3'-phosphorothioate
  modified_base 14: mod_base = OTHER; note = cEt 5-methylcytidine 3'-phosphorothioate
  modified_base 15: mod_base = OTHER; note = cEt guanosine 3'-phosphorothioate
  modified_base 16: mod_base = OTHER; note = cEt thymidine
gggaaggtggatccgt

SEQ ID NO: 1395 - DNA, 16 bp, synthetic construct
  source 1..16: mol_type = other DNA
  modified_base 1: mod_base = OTHER; note = 2'-O-methoxyethyl adenosine 3'-phosphorothioate
  modified_base 3: mod_base = OTHER; note = 2'-O-methoxyethyl adenosine 3'-phosphorothioate
  modified_base 2: mod_base = OTHER; note = 2'-O-methoxyethyl 5-methylcytidine 3'-phosphorothioate
  modified_base 4..5: mod_base = OTHER; note = 2'-deoxyguanosine 3'-phosphorothioate
  modified_base 6: mod_base = OTHER; note = 2'-deoxyadenosine 3'-phosphorothioate
  modified_base 7: mod_base = OTHER; note = 2'-deoxyguanosine 3'-phosphorothioate
  modified_base 8: mod_base = OTHER; note = 5-methyl-2'-deoxycytidine 3'-phosphorothioate
  modified_base 9: mod_base = OTHER; note = 2'-deoxyadenosine 3'-phosphorothioate
  modified_base 10..12: mod_base = OTHER; note = 2'-deoxyguanosine 3'-phosphorothioate
  modified_base 13: mod_base = OTHER; note = 2'-deoxyadenosine 3'-phosphorothioate
  modified_base 14..15: mod_base = OTHER; note = cEt adenosine 3'-phosphorothioate
  modified_base 16: mod_base = OTHER; note = cEt guanosine
acaggagcagggaaag

SEQ ID NO: 1396 - DNA, 16 bp, synthetic construct
  source 1..16: mol_type = other DNA
  modified_base 1: mod_base = OTHER; note = 2'-O-methoxyethyl 5-methylcytidine 3'-phosphorothioate
  modified_base 2: mod_base = OTHER; note = 2'-O-methoxyethyl adenosine 3'-phosphorothioate
  modified_base 3: mod_base = OTHER; note = 2'-O-methoxyethyl guanosine 3'-phosphorothioate
  modified_base 4: mod_base = OTHER; note = 2'-deoxyadenosine 3'-phosphorothioate
  modified_base 5: mod_base = OTHER; note = 5-methyl-2'-deoxycytidine 3'-phosphorothioate
  modified_base 6: mod_base = OTHER; note = 2'-deoxythymidine 3'-phosphorothioate
  modified_base 7: mod_base = OTHER; note = 2'-deoxyguanosine 3'-phosphorothioate
  modified_base 8: mod_base = OTHER; note = 5-methyl-2'-deoxycytidine 3'-phosphorothioate
  modified_base 9..10: mod_base = OTHER; note = 2'-deoxyguanosine 3'-phosphorothioate
  modified_base 11: mod_base = OTHER; note = 2'-deoxythymidine 3'-phosphorothioate
  modified_base 12: mod_base = OTHER; note = 2'-deoxyguanosine 3'-phosphorothioate
  modified_base 13: mod_base = OTHER; note = 2'-deoxyadenosine 3'-phosphorothioate
  modified_base 14: mod_base = OTHER; note = cEt guanosine 3'-phosphorothioate
  modified_base 15: mod_base = OTHER; note = cEt thymidine 3'-phosphorothioate
  modified_base 16: mod_base = OTHER; note = cEt thymidine
cagactgcggtgagtt

SEQ ID NO: 1397 - DNA, 16 bp, synthetic construct
  source 1..16: mol_type = other DNA
  modified_base 1..2: mod_base = OTHER; note = 2'-O-methoxyethyl guanosine 3'-phosphorothioate
  modified_base 3: mod_base = OTHER; note = 2'-O-methoxyethyl 5-methylcytidine 3'-phosphorothioate
  modified_base 4: mod_base = OTHER; note = 2'-deoxythymidine 3'-phosphorothioate
  modified_base 5..6: mod_base = OTHER; note = 5-methyl-2'-deoxycytidine 3'-phosphorothioate
  modified_base 8..10: mod_base = OTHER; note = 2'-deoxyguanosine 3'-phosphorothioate
  modified_base 11: mod_base = OTHER; note = 5-methyl-2'-deoxycytidine 3'-phosphorothioate
  modified_base 12..13: mod_base = OTHER; note = 2'-deoxyguanosine 3'-phosphorothioate
  modified_base 14: mod_base = OTHER; note = cEt 5-methylcytidine 3'-phosphorothioate
  modified_base 15: mod_base = OTHER; note = cEt guanosine 3'-phosphorothioate
  modified_base 16: mod_base = OTHER; note = cEt 5-methylcytidine
ggctcctgggcggcgc

SEQ ID NO: 1398 - DNA, 16 bp, synthetic construct
  source 1..16: mol_type = other DNA
  modified_base 1..2: mod_base = OTHER; note = 2'-O-methoxyethyl guanosine 3'-phosphorothioate
  modified_base 3: mod_base = OTHER; note = 2'-O-methoxyethyl 5-methylcytidine 3'-phosphorothioate
  modified_base 4..5: mod_base = OTHER; note = 2'-deoxyguanosine 3'-phosphorothioate
  modified_base 6: mod_base = OTHER; note = 5-methyl-2'-deoxycytidine 3'-phosphorothioate
  modified_base 7: mod_base = OTHER; note = 2'-deoxythymidine 3'-phosphorothioate
  modified_base 8..9: mod_base = OTHER; note = 5-methyl-2'-deoxycytidine 3'-phosphorothioate
  modified_base 10: mod_base = OTHER; note = 2'-deoxythymidine 3'-phosphorothioate
  modified_base 11..13: mod_base = OTHER; note = 2'-deoxyguanosine 3'-phosphorothioate
  modified_base 14: mod_base = OTHER; note = cEt 5-methylcytidine 3'-phosphorothioate
  modified_base 15: mod_base = OTHER; note = cEt guanosine 3'-phosphorothioate
  modified_base 16: mod_base = OTHER; note = cEt guanosine
ggcggctcctgggcgg

SEQ ID NO: 1399 - DNA, 16 bp, synthetic construct
  source 1..16: mol_type = other DNA
  modified_base 1: mod_base = OTHER; note = 2'-O-methoxyethyl 5-methylcytidine 3'-phosphorothioate
  modified_base 3: mod_base = OTHER; note = 2'-O-methoxyethyl 5-methylcytidine 3'-phosphorothioate
  modified_base 2: mod_base = OTHER; note = 2'-O-methoxyethyl guanosine 3'-phosphorothioate
  modified_base 4..6: mod_base = OTHER; note = 2'-deoxyguanosine 3'-phosphorothioate
  modified_base 7: mod_base = OTHER; note = 5-methyl-2'-deoxycytidine 3'-phosphorothioate
  modified_base 8..9: mod_base = OTHER; note = 2'-deoxyguanosine 3'-phosphorothioate
  modified_base 10: mod_base = OTHER; note = 5-methyl-2'-deoxycytidine 3'-phosphorothioate
  modified_base 11: mod_base = OTHER; note = 2'-deoxythymidine 3'-phosphorothioate
  modified_base 12..13: mod_base = OTHER; note = 5-methyl-2'-deoxycytidine 3'-phosphorothioate
  modified_base 14: mod_base = OTHER; note = cEt thymidine 3'-phosphorothioate
  modified_base 15: mod_base = OTHER; note = cEt guanosine 3'-phosphorothioate
  modified_base 16: mod_base = OTHER; note = cEt guanosine
cgcgggcggctcctgg

SEQ ID NO: 1400 - DNA, 16 bp, synthetic construct
  source 1..16: mol_type = other DNA
  modified_base 1: mod_base = OTHER; note = 2'-O-methoxyethyl guanosine 3'-phosphorothioate
  modified_base 3: mod_base = OTHER; note = 2'-O-methoxyethyl guanosine 3'-phosphorothioate
  modified_base 2: mod_base = OTHER; note = 2'-O-methoxyethyl adenosine 3'-phosphorothioate
  modified_base 4: mod_base = OTHER; note = 5-methyl-2'-deoxycytidine 3'-phosphorothioate
  modified_base 5: mod_base = OTHER; note = 2'-deoxyguanosine 3'-phosphorothioate
  modified_base 6: mod_base = OTHER; note = 5-methyl-2'-deoxycytidine 3'-phosphorothioate
  modified_base 7..9: mod_base = OTHER; note = 2'-deoxyguanosine 3'-phosphorothioate
  modified_base 10: mod_base = OTHER; note = 5-methyl-2'-deoxycytidine 3'-phosphorothioate
  modified_base 11..12: mod_base = OTHER; note = 2'-deoxyguanosine 3'-phosphorothioate
  modified_base 13: mod_base = OTHER; note = 5-methyl-2'-deoxycytidine 3'-phosphorothioate
  modified_base 14: mod_base = OTHER; note = cEt thymidine 3'-phosphorothioate
  modified_base 15: mod_base = OTHER; note = cEt 5-methylcytidine 3'-phosphorothioate
  modified_base 16: mod_base = OTHER; note = cEt 5-methylcytidine
gagcgcgggcggctcc

SEQ ID NO: 1401 - DNA, 16 bp, synthetic construct
  source 1..16: mol_type = other DNA
  modified_base 1..2: mod_base = OTHER; note = 2'-O-methoxyethyl guanosine 3'-phosphorothioate
  modified_base 3: mod_base = OTHER; note = 2'-O-methoxyethyl thymidine 3'-phosphorothioate
  modified_base 4: mod_base = OTHER; note = 2'-deoxythymidine 3'-phosphorothioate
  modified_base 5: mod_base = OTHER; note = 5-methyl-2'-deoxycytidine 3'-phosphorothioate
  modified_base 6: mod_base = OTHER; note = 2'-deoxyadenosine 3'-phosphorothioate
  modified_base 7..9: mod_base = OTHER; note = 2'-deoxyguanosine 3'-phosphorothioate
  modified_base 10: mod_base = OTHER; note = 2'-deoxyadenosine 3'-phosphorothioate
  modified_base 11: mod_base = OTHER; note = 2'-deoxyguanosine 3'-phosphorothioate
  modified_base 12: mod_base = OTHER; note = 5-methyl-2'-deoxycytidine 3'-phosphorothioate
  modified_base 13: mod_base = OTHER; note = 2'-deoxyguanosine 3'-phosphorothioate
  modified_base 14: mod_base = OTHER; note = cEt 5-methylcytidine 3'-phosphorothioate
  modified_base 15: mod_base = OTHER; note = cEt guanosine 3'-phosphorothioate
  modified_base 16: mod_base = OTHER; note = cEt guanosine
ggttcagggagcgcgg

SEQ ID NO: 1402 - DNA, 16 bp, synthetic construct
  source 1..16: mol_type = other DNA
  modified_base 1: mod_base = OTHER; note = 2'-O-methoxyethyl adenosine 3'-phosphorothioate
  modified_base 2: mod_base = OTHER; note = 2'-O-methoxyethyl guanosine 3'-phosphorothioate
  modified_base 3: mod_base = OTHER; note = 2'-O-methoxyethyl thymidine 3'-phosphorothioate
  modified_base 4: mod_base = OTHER; note = 2'-deoxythymidine 3'-phosphorothioate
  modified_base 5: mod_base = OTHER; note = 5-methyl-2'-deoxycytidine 3'-phosphorothioate
  modified_base 6: mod_base = OTHER; note = 2'-deoxythymidine 3'-phosphorothioate
  modified_base 7: mod_base = OTHER; note = 2'-deoxyadenosine 3'-phosphorothioate
  modified_base 8..10: mod_base = OTHER; note = 2'-deoxyguanosine 3'-phosphorothioate
  modified_base 11..12: mod_base = OTHER; note = 2'-deoxythymidine 3'-phosphorothioate
  modified_base 13: mod_base = OTHER; note = 5-methyl-2'-deoxycytidine 3'-phosphorothioate
  modified_base 14: mod_base = OTHER; note = cEt adenosine 3'-phosphorothioate
  modified_base 15: mod_base = OTHER; note = cEt guanosine 3'-phosphorothioate
  modified_base 16: mod_base = OTHER; note = cEt guanosine
agttctagggttcagg

SEQ ID NO: 1403 - DNA, 16 bp, synthetic construct
  source 1..16: mol_type = other DNA
  modified_base 1: mod_base = OTHER; note = 2'-O-methoxyethyl 5-methylcytidine 3'-phosphorothioate
  modified_base 2: mod_base = OTHER; note = 2'-O-methoxyethyl adenosine 3'-phosphorothioate
  modified_base 3: mod_base = OTHER; note = 2'-O-methoxyethyl guanosine 3'-phosphorothioate
  modified_base 4..5: mod_base = OTHER; note = 2'-deoxythymidine 3'-phosphorothioate
  modified_base 6: mod_base = OTHER; note = 5-methyl-2'-deoxycytidine 3'-phosphorothioate
  modified_base 7: mod_base = OTHER; note = 2'-deoxythymidine 3'-phosphorothioate
  modified_base 8: mod_base = OTHER; note = 2'-deoxyadenosine 3'-phosphorothioate
  modified_base 9..11: mod_base = OTHER; note = 2'-deoxyguanosine 3'-phosphorothioate
  modified_base 12..13: mod_base = OTHER; note = 2'-deoxythymidine 3'-phosphorothioate
  modified_base 14: mod_base = OTHER; note = cEt 5-methylcytidine 3'-phosphorothioate
  modified_base 15: mod_base = OTHER; note = cEt adenosine 3'-phosphorothioate
  modified_base 16: mod_base = OTHER; note = cEt guanosine
cagttctagggttcag

SEQ ID NO: 1404 - DNA, 16 bp, synthetic construct
  source 1..16: mol_type = other DNA
  modified_base 1: mod_base = OTHER; note = 2'-O-methoxyethyl adenosine 3'-phosphorothioate
  modified_base 3: mod_base = OTHER; note = 2'-O-methoxyethyl adenosine 3'-phosphorothioate
  modified_base 2: mod_base = OTHER; note = 2'-O-methoxyethyl 5-methylcytidine 3'-phosphorothioate
  modified_base 4: mod_base = OTHER; note = 2'-deoxyguanosine 3'-phosphorothioate
  modified_base 5..6: mod_base = OTHER; note = 2'-deoxythymidine 3'-phosphorothioate
  modified_base 7: mod_base = OTHER; note = 5-methyl-2'-deoxycytidine 3'-phosphorothioate
  modified_base 8: mod_base = OTHER; note = 2'-deoxythymidine 3'-phosphorothioate
  modified_base 9: mod_base = OTHER; note = 2'-deoxyadenosine 3'-phosphorothioate
  modified_base 10..12: mod_base = OTHER; note = 2'-deoxyguanosine 3'-phosphorothioate
  modified_base 13: mod_base = OTHER; note = 2'-deoxythymidine 3'-phosphorothioate
  modified_base 14: mod_base = OTHER; note = cEt thymidine 3'-phosphorothioate
  modified_base 15: mod_base = OTHER; note = cEt 5-methylcytidine 3'-phosphorothioate
  modified_base 16: mod_base = OTHER; note = cEt adenosine
acagttctagggttca

SEQ ID NO: 1405 - DNA, 16 bp, synthetic construct
  source 1..16: mol_type = other DNA
  modified_base 1: mod_base = OTHER; note = 2'-O-methoxyethyl guanosine 3'-phosphorothioate
  modified_base 2: mod_base = OTHER; note = 2'-O-methoxyethyl adenosine 3'-phosphorothioate
  modified_base 3: mod_base = OTHER; note = 2'-O-methoxyethyl 5-methylcytidine 3'-phosphorothioate
  modified_base 4: mod_base = OTHER; note = 2'-deoxyadenosine 3'-phosphorothioate
  modified_base 5: mod_base = OTHER; note = 2'-deoxyguanosine 3'-phosphorothioate
  modified_base 6..7: mod_base = OTHER; note = 2'-deoxythymidine 3'-phosphorothioate
  modified_base 8: mod_base = OTHER; note = 5-methyl-2'-deoxycytidine 3'-phosphorothioate
  modified_base 9: mod_base = OTHER; note = 2'-deoxythymidine 3'-phosphorothioate
  modified_base 10: mod_base = OTHER; note = 2'-deoxyadenosine 3'-phosphorothioate
  modified_base 11..13: mod_base = OTHER; note = 2'-deoxyguanosine 3'-phosphorothioate
  modified_base 14..15: mod_base = OTHER; note = cEt thymidine 3'-phosphorothioate
  modified_base 16: mod_base = OTHER; note = cEt 5-methylcytidine
gacagttctagggttc

SEQ ID NO: 1406 - DNA, 16 bp, synthetic construct
  source 1..16: mol_type = other DNA
  modified_base 1: mod_base = OTHER; note = 2'-O-methoxyethyl adenosine 3'-phosphorothioate
  modified_base 3: mod_base = OTHER; note = 2'-O-methoxyethyl adenosine 3'-phosphorothioate
  modified_base 2: mod_base = OTHER; note = 2'-O-methoxyethyl guanosine 3'-phosphorothioate
  modified_base 4: mod_base = OTHER; note = 5-methyl-2'-deoxycytidine 3'-phosphorothioate
  modified_base 5: mod_base = OTHER; note = 2'-deoxyadenosine 3'-phosphorothioate
  modified_base 6: mod_base = OTHER; note = 2'-deoxyguanosine 3'-phosphorothioate
  modified_base 7..8: mod_base = OTHER; note = 2'-deoxythymidine 3'-phosphorothioate
  modified_base 9: mod_base = OTHER; note = 5-methyl-2'-deoxycytidine 3'-phosphorothioate
  modified_base 10: mod_base = OTHER; note = 2'-deoxythymidine 3'-phosphorothioate
  modified_base 11: mod_base = OTHER; note = 2'-deoxyadenosine 3'-phosphorothioate
  modified_base 12..13: mod_base = OTHER; note = 2'-deoxyguanosine 3'-phosphorothioate
  modified_base 14: mod_base = OTHER; note = cEt guanosine 3'-phosphorothioate
  modified_base 15: mod_base = OTHER; note = cEt thymidine 3'-phosphorothioate
  modified_base 16: mod_base = OTHER; note = cEt thymidine
agacagttctagggtt

SEQ ID NO: 1407 - DNA, 16 bp, synthetic construct
  source 1..16: mol_type = other DNA
  modified_base 1..2: mod_base = OTHER; note = 2'-O-methoxyethyl adenosine 3'-phosphorothioate
  modified_base 3: mod_base = OTHER; note = 2'-O-methoxyethyl guanosine 3'-phosphorothioate
  modified_base 4: mod_base = OTHER; note = 2'-deoxyadenosine 3'-phosphorothioate
  modified_base 5: mod_base = OTHER; note = 5-methyl-2'-deoxycytidine 3'-phosphorothioate
  modified_base 6: mod_base = OTHER; note = 2'-deoxyadenosine 3'-phosphorothioate
  modified_base 7: mod_base = OTHER; note = 2'-deoxyguanosine 3'-phosphorothioate
  modified_base 8..9: mod_base = OTHER; note = 2'-deoxythymidine 3'-phosphorothioate
  modified_base 10: mod_base = OTHER; note = 5-methyl-2'-deoxycytidine 3'-phosphorothioate
  modified_base 11: mod_base = OTHER; note = 2'-deoxythymidine 3'-phosphorothioate
  modified_base 12: mod_base = OTHER; note = 2'-deoxyadenosine 3'-phosphorothioate
  modified_base 13: mod_base = OTHER; note = 2'-deoxyguanosine 3'-phosphorothioate
  modified_base 14..15: mod_base = OTHER; note = cEt guanosine 3'-phosphorothioate
  modified_base 16: mod_base = OTHER; note = cEt thymidine
aagacagttctagggt

SEQ ID NO: 1408 - DNA, 16 bp, synthetic construct
  source 1..16: mol_type = other DNA
  modified_base 1: mod_base = OTHER; note = 2'-O-methoxyethyl guanosine 3'-phosphorothioate
  modified_base 2..3: mod_base = OTHER; note = 2'-O-methoxyethyl adenosine 3'-phosphorothioate
  modified_base 4: mod_base = OTHER; note = 2'-deoxyguanosine 3'-phosphorothioate
  modified_base 5: mod_base = OTHER; note = 2'-deoxyadenosine 3'-phosphorothioate
  modified_base 6: mod_base = OTHER; note = 5-methyl-2'-deoxycytidine 3'-phosphorothioate
  modified_base 7: mod_base = OTHER; note = 2'-deoxyadenosine 3'-phosphorothioate
  modified_base 8: mod_base = OTHER; note = 2'-deoxyguanosine 3'-phosphorothioate
  modified_base 9..10: mod_base = OTHER; note = 2'-deoxythymidine 3'-phosphorothioate
  modified_base 11: mod_base = OTHER; note = 5-methyl-2'-deoxycytidine 3'-phosphorothioate
  modified_base 12: mod_base = OTHER; note = 2'-deoxythymidine 3'-phosphorothioate
  modified_base 13: mod_base = OTHER; note = 2'-deoxyadenosine 3'-phosphorothioate
  modified_base 14..15: mod_base = OTHER; note = cEt guanosine 3'-phosphorothioate
  modified_base 16: mod_base = OTHER; note = cEt guanosine
gaagacagttctaggg

SEQ ID NO: 1409 - DNA, 16 bp, synthetic construct
  source 1..16: mol_type = other DNA
  modified_base 1: mod_base = OTHER; note = 2'-O-methoxyethyl 5-methylcytidine 3'-phosphorothioate
  modified_base 2: mod_base = OTHER; note = 2'-O-methoxyethyl guanosine 3'-phosphorothioate
  modified_base 3: mod_base = OTHER; note = 2'-O-methoxyethyl adenosine 3'-phosphorothioate
  modified_base 4: mod_base = OTHER; note = 2'-deoxyadenosine 3'-phosphorothioate
  modified_base 5: mod_base = OTHER; note = 2'-deoxyguanosine 3'-phosphorothioate
  modified_base 6: mod_base = OTHER; note = 2'-deoxyadenosine 3'-phosphorothioate
  modified_base 7: mod_base = OTHER; note = 5-methyl-2'-deoxycytidine 3'-phosphorothioate
  modified_base 8: mod_base = OTHER; note = 2'-deoxyadenosine 3'-phosphorothioate
  modified_base 9: mod_base = OTHER; note = 2'-deoxyguanosine 3'-phosphorothioate
  modified_base 10..11: mod_base = OTHER; note = 2'-deoxythymidine 3'-phosphorothioate
  modified_base 13: mod_base = OTHER; note = 2'-deoxythymidine 3'-phosphorothioate
  modified_base 12: mod_base = OTHER; note = 5-methyl-2'-deoxycytidine 3'-phosphorothioate
  modified_base 14: mod_base = OTHER; note = cEt adenosine 3'-phosphorothioate
  modified_base 15: mod_base = OTHER; note = cEt guanosine 3'-phosphorothioate
  modified_base 16: mod_base = OTHER; note = cEt guanosine
cgaagacagttctagg

SEQ ID NO: 1410 - DNA, 16 bp, synthetic construct
  source 1..16: mol_type = other DNA
  modified_base 1: mod_base = OTHER; note = 2'-O-methoxyethyl thymidine 3'-phosphorothioate
  modified_base 2: mod_base = OTHER; note = 2'-O-methoxyethyl 5-methylcytidine 3'-phosphorothioate
  modified_base 3: mod_base = OTHER; note = 2'-O-methoxyethyl guanosine 3'-phosphorothioate
  modified_base 4..5: mod_base = OTHER; note = 2'-deoxyadenosine 3'-phosphorothioate
  modified_base 6: mod_base = OTHER; note = 2'-deoxyguanosine 3'-phosphorothioate
  modified_base 7: mod_base = OTHER; note = 2'-deoxyadenosine 3'-phosphorothioate
  modified_base 8: mod_base = OTHER; note = 5-methyl-2'-deoxycytidine 3'-phosphorothioate
  modified_base 9: mod_base = OTHER; note = 2'-deoxyadenosine 3'-phosphorothioate
  modified_base 10: mod_base = OTHER; note = 2'-deoxyguanosine 3'-phosphorothioate
  modified_base 11..12: mod_base = OTHER; note = 2'-deoxythymidine 3'-phosphorothioate
  modified_base 13: mod_base = OTHER; note = 5-methyl-2'-deoxycytidine 3'-phosphorothioate
  modified_base 14: mod_base = OTHER; note = cEt thymidine 3'-phosphorothioate
  modified_base 15: mod_base = OTHER; note = cEt adenosine 3'-phosphorothioate
  modified_base 16: mod_base = OTHER; note = cEt guanosine
tcgaagacagttctag

SEQ ID NO: 1411 - DNA, 16 bp, synthetic construct
  source 1..16: mol_type = other DNA
  modified_base 1: mod_base = OTHER; note = 2'-O-methoxyethyl guanosine 3'-phosphorothioate
  modified_base 2: mod_base = OTHER; note = 2'-O-methoxyethyl thymidine 3'-phosphorothioate
  modified_base 3: mod_base = OTHER; note = 2'-O-methoxyethyl 5-methylcytidine 3'-phosphorothioate
  modified_base 4: mod_base = OTHER; note = 2'-deoxyguanosine 3'-phosphorothioate
  modified_base 5..6: mod_base = OTHER; note = 2'-deoxyadenosine 3'-phosphorothioate
  modified_base 7: mod_base = OTHER; note = 2'-deoxyguanosine 3'-phosphorothioate
  modified_base 8: mod_base = OTHER; note = 2'-deoxyadenosine 3'-phosphorothioate
  modified_base 9: mod_base = OTHER; note = 5-methyl-2'-deoxycytidine 3'-phosphorothioate
  modified_base 10: mod_base = OTHER; note = 2'-deoxyadenosine 3'-phosphorothioate
  modified_base 11: mod_base = OTHER; note = 2'-deoxyguanosine 3'-phosphorothioate
  modified_base 12..13: mod_base = OTHER; note = 2'-deoxythymidine 3'-phosphorothioate
  modified_base 14: mod_base = OTHER; note = cEt 5-methylcytidine 3'-phosphorothioate
  modified_base 15: mod_base = OTHER; note = cEt thymidine 3'-phosphorothioate
  modified_base 16: mod_base = OTHER; note = cEt adenosine
gtcgaagacagttcta

SEQ ID NO: 1412 - DNA, 16 bp, synthetic construct
  source 1..16: mol_type = other DNA
  modified_base 1: mod_base = OTHER; note = 2'-O-methoxyethyl adenosine 3'-phosphorothioate
  modified_base 2: mod_base = OTHER; note = 2'-O-methoxyethyl guanosine 3'-phosphorothioate
  modified_base 3: mod_base = OTHER; note = 2'-O-methoxyethyl thymidine 3'-phosphorothioate
  modified_base 4: mod_base = OTHER; note = 5-methyl-2'-deoxycytidine 3'-phosphorothioate
  modified_base 5: mod_base = OTHER; note = 2'-deoxyguanosine 3'-phosphorothioate
  modified_base 6..7: mod_base = OTHER; note = 2'-deoxyadenosine 3'-phosphorothioate
  modified_base 8: mod_base = OTHER; note = 2'-deoxyguanosine 3'-phosphorothioate
  modified_base 9: mod_base = OTHER; note = 2'-deoxyadenosine 3'-phosphorothioate
  modified_base 10: mod_base = OTHER; note = 5-methyl-2'-deoxycytidine 3'-phosphorothioate
  modified_base 11: mod_base = OTHER; note = 2'-deoxyadenosine 3'-phosphorothioate
  modified_base 12: mod_base = OTHER; note = 2'-deoxyguanosine 3'-phosphorothioate
  modified_base 13: mod_base = OTHER; note = 2'-deoxythymidine 3'-phosphorothioate
  modified_base 14: mod_base = OTHER; note = cEt thymidine 3'-phosphorothioate
  modified_base 15: mod_base = OTHER; note = cEt 5-methylcytidine 3'-phosphorothioate
  modified_base 16: mod_base = OTHER; note = cEt thymidine
agtcgaagacagttct

SEQ ID NO: 1413 - DNA, 16 bp, synthetic construct
  source 1..16: mol_type = other DNA
  modified_base 1: mod_base = OTHER; note = 2'-O-methoxyethyl guanosine 3'-phosphorothioate
  modified_base 2: mod_base = OTHER; note = 2'-O-methoxyethyl adenosine 3'-phosphorothioate
  modified_base 3: mod_base = OTHER; note = 2'-O-methoxyethyl guanosine 3'-phosphorothioate
  modified_base 4: mod_base = OTHER; note = 2'-deoxythymidine 3'-phosphorothioate
  modified_base 5: mod_base = OTHER; note = 5-methyl-2'-deoxycytidine 3'-phosphorothioate
  modified_base 6: mod_base = OTHER; note = 2'-deoxyguanosine 3'-phosphorothioate
  modified_base 7..8: mod_base = OTHER; note = 2'-deoxyadenosine 3'-phosphorothioate
  modified_base 9: mod_base = OTHER; note = 2'-deoxyguanosine 3'-phosphorothioate
  modified_base 10: mod_base = OTHER; note = 2'-deoxyadenosine 3'-phosphorothioate
  modified_base 11: mod_base = OTHER; note = 5-methyl-2'-deoxycytidine 3'-phosphorothioate
  modified_base 12: mod_base = OTHER; note = 2'-deoxyadenosine 3'-phosphorothioate
  modified_base 13: mod_base = OTHER; note = 2'-deoxyguanosine 3'-phosphorothioate
  modified_base 14..15: mod_base = OTHER; note = cEt thymidine 3'-phosphorothioate
  modified_base 16: mod_base = OTHER; note = cEt 5-methylcytidine
gagtcgaagacagttc

SEQ ID NO: 1414 - DNA, 16 bp, synthetic construct
  source 1..16: mol_type = other DNA
  modified_base 1..2: mod_base = OTHER; note = 2'-O-methoxyethyl guanosine 3'-phosphorothioate
  modified_base 3: mod_base = OTHER; note = 2'-O-methoxyethyl adenosine 3'-phosphorothioate
  modified_base 4: mod_base = OTHER; note = 2'-deoxyguanosine 3'-phosphorothioate
  modified_base 5: mod_base = OTHER; note = 2'-deoxythymidine 3'-phosphorothioate
  modified_base 6: mod_base = OTHER; note = 5-methyl-2'-deoxycytidine 3'-phosphorothioate
  modified_base 7: mod_base = OTHER; note = 2'-deoxyguanosine 3'-phosphorothioate
  modified_base 8..9: mod_base = OTHER; note = 2'-deoxyadenosine 3'-phosphorothioate
  modified_base 10: mod_base = OTHER; note = 2'-deoxyguanosine 3'-phosphorothioate
  modified_base 11: mod_base = OTHER; note = 2'-deoxyadenosine 3'-phosphorothioate
  modified_base 12: mod_base = OTHER; note = 5-methyl-2'-deoxycytidine 3'-phosphorothioate
  modified_base 13: mod_base = OTHER; note = 2'-deoxyadenosine 3'-phosphorothioate
  modified_base 14: mod_base = OTHER; note = cEt guanosine 3'-phosphorothioate
  modified_base 15: mod_base = OTHER; note = cEt thymidine 3'-phosphorothioate
  modified_base 16: mod_base = OTHER; note = cEt thymidine
ggagtcgaagacagtt

SEQ ID NO: 1415 - DNA, 16 bp, synthetic construct
  source 1..16: mol_type = other DNA
  modified_base 1: mod_base = OTHER; note = 2'-O-methoxyethyl 5-methylcytidine 3'-phosphorothioate
  modified_base 2..3: mod_base = OTHER; note = 2'-O-methoxyethyl guanosine 3'-phosphorothioate
  modified_base 4: mod_base = OTHER; note = 2'-deoxyadenosine 3'-phosphorothioate
  modified_base 5: mod_base = OTHER; note = 2'-deoxyguanosine 3'-phosphorothioate
  modified_base 6: mod_base = OTHER; note = 2'-deoxythymidine 3'-phosphorothioate
  modified_base 7: mod_base = OTHER; note = 5-methyl-2'-deoxycytidine 3'-phosphorothioate
  modified_base 8: mod_base = OTHER; note = 2'-deoxyguanosine 3'-phosphorothioate
  modified_base 9..10: mod_base = OTHER; note = 2'-deoxyadenosine 3'-phosphorothioate
  modified_base 11: mod_base = OTHER; note = 2'-deoxyguanosine 3'-phosphorothioate
  modified_base 12: mod_base = OTHER; note = 2'-deoxyadenosine 3'-phosphorothioate
  modified_base 13: mod_base = OTHER; note = 5-methyl-2'-deoxycytidine 3'-phosphorothioate
  modified_base 14: mod_base = OTHER; note = cEt adenosine 3'-phosphorothioate
  modified_base 15: mod_base = OTHER; note = cEt guanosine 3'-phosphorothioate
  modified_base 16: mod_base = OTHER; note = cEt thymidine
cggagtcgaagacagt

SEQ ID NO: 1416 - DNA, 16 bp, synthetic construct
  source 1..16: mol_type = other DNA
  modified_base 1..2: mod_base = OTHER; note = 2'-O-methoxyethyl 5-methylcytidine 3'-phosphorothioate
  modified_base 3: mod_base = OTHER; note = 2'-O-methoxyethyl guanosine 3'-phosphorothioate
  modified_base 4: mod_base = OTHER; note = 2'-deoxyguanosine 3'-phosphorothioate
  modified_base 5: mod_base = OTHER; note = 2'-deoxyadenosine 3'-phosphorothioate
  modified_base 6: mod_base = OTHER; note = 2'-deoxyguanosine 3'-phosphorothioate
  modified_base 7: mod_base = OTHER; note = 2'-deoxythymidine 3'-phosphorothioate
  modified_base 8: mod_base = OTHER; note = 5-methyl-2'-deoxycytidine 3'-phosphorothioate
  modified_base 9: mod_base = OTHER; note = 2'-deoxyguanosine 3'-phosphorothioate
  modified_base 10..11: mod_base = OTHER; note = 2'-deoxyadenosine 3'-phosphorothioate
  modified_base 12: mod_base = OTHER; note = 2'-deoxyguanosine 3'-phosphorothioate
  modified_base 13: mod_base = OTHER; note = 2'-deoxyadenosine 3'-phosphorothioate
  modified_base 14: mod_base = OTHER; note = cEt 5-methylcytidine 3'-phosphorothioate
  modified_base 15: mod_base = OTHER; note = cEt adenosine 3'-phosphorothioate
  modified_base 16: mod_base = OTHER; note = cEt guanosine
ccggagtcgaagacag

SEQ ID NO: 1417 - DNA, 16 bp, synthetic construct
  source 1..16: mol_type = other DNA
  modified_base 1..3: mod_base = OTHER; note = 2'-O-methoxyethyl 5-methylcytidine 3'-phosphorothioate
  modified_base 4..5: mod_base = OTHER; note = 2'-deoxyguanosine 3'-phosphorothioate
  modified_base 6: mod_base = OTHER; note = 2'-deoxyadenosine 3'-phosphorothioate
  modified_base 7: mod_base = OTHER; note = 2'-deoxyguanosine 3'-phosphorothioate
  modified_base 8: mod_base = OTHER; note = 2'-deoxythymidine 3'-phosphorothioate
  modified_base 9: mod_base = OTHER; note = 5-methyl-2'-deoxycytidine 3'-phosphorothioate
  modified_base 10: mod_base = OTHER; note = 2'-deoxyguanosine 3'-phosphorothioate
  modified_base 11..12: mod_base = OTHER; note = 2'-deoxyadenosine 3'-phosphorothioate
  modified_base 13: mod_base = OTHER; note = 2'-deoxyguanosine 3'-phosphorothioate
  modified_base 14: mod_base = OTHER; note = cEt adenosine 3'-phosphorothioate
  modified_base 15: mod_base = OTHER; note = cEt 5-methylcytidine 3'-phosphorothioate
  modified_base 16: mod_base = OTHER; note = cEt adenosine
cccggagtcgaagaca

SEQ ID NO: 1418 - DNA, 16 bp, synthetic construct
  source 1..16: mol_type = other DNA
  modified_base 1..3: mod_base = OTHER; note = 2'-O-methoxyethyl 5-methylcytidine 3'-phosphorothioate
  modified_base 4: mod_base = OTHER; note = 5-methyl-2'-deoxycytidine 3'-phosphorothioate
  modified_base 5..6: mod_base = OTHER; note = 2'-deoxyguanosine 3'-phosphorothioate
  modified_base 7: mod_base = OTHER; note = 2'-deoxyadenosine 3'-phosphorothioate
  modified_base 8: mod_base = OTHER; note = 2'-deoxyguanosine 3'-phosphorothioate
  modified_base 9: mod_base = OTHER; note = 2'-deoxythymidine 3'-phosphorothioate
  modified_base 10: mod_base = OTHER; note = 5-methyl-2'-deoxycytidine 3'-phosphorothioate
  modified_base 11: mod_base = OTHER; note = 2'-deoxyguanosine 3'-phosphorothioate
  modified_base 12..13: mod_base = OTHER; note = 2'-deoxyadenosine 3'-phosphorothioate
  modified_base 14: mod_base = OTHER; note = cEt guanosine 3'-phosphorothioate
  modified_base 15: mod_base = OTHER; note = cEt adenosine 3'-phosphorothioate
  modified_base 16: mod_base = OTHER; note = cEt 5-methylcytidine
ccccggagtcgaagac

SEQ ID NO: 1419 - DNA, 16 bp, synthetic construct
  source 1..16: mol_type = other DNA
  modified_base 1: mod_base = OTHER; note = 2'-O-methoxyethyl guanosine 3'-phosphorothioate
  modified_base 2..3: mod_base = OTHER; note = 2'-O-methoxyethyl 5-methylcytidine 3'-phosphorothioate
  modified_base 4..5: mod_base = OTHER; note = 5-methyl-2'-deoxycytidine 3'-phosphorothioate
  modified_base 6..7: mod_base = OTHER; note = 2'-deoxyguanosine 3'-phosphorothioate
  modified_base 8: mod_base = OTHER; note = 2'-deoxyadenosine 3'-phosphorothioate
  modified_base 9: mod_base = OTHER; note = 2'-deoxyguanosine 3'-phosphorothioate
  modified_base 10: mod_base = OTHER; note = 2'-deoxythymidine 3'-phosphorothioate
  modified_base 11: mod_base = OTHER; note = 5-methyl-2'-deoxycytidine 3'-phosphorothioate
  modified_base 12: mod_base = OTHER; note = 2'-deoxyguanosine 3'-phosphorothioate
  modified_base 13: mod_base = OTHER; note = 2'-deoxyadenosine 3'-phosphorothioate
  modified_base 14: mod_base = OTHER; note = cEt adenosine 3'-phosphorothioate
  modified_base 15: mod_base = OTHER; note = cEt guanosine 3'-phosphorothioate
  modified_base 16: mod_base = OTHER; note = cEt adenosine
gccccggagtcgaaga

SEQ ID NO: 1420 - DNA, 16 bp, synthetic construct
  source 1..16: mol_type = other DNA
  modified_base 1..2: mod_base = OTHER; note = 2'-O-methoxyethyl guanosine 3'-phosphorothioate
  modified_base 3: mod_base = OTHER; note = 2'-O-methoxyethyl 5-methylcytidine 3'-phosphorothioate
  modified_base 4..6: mod_base = OTHER; note = 5-methyl-2'-deoxycytidine 3'-phosphorothioate
  modified_base 7..8: mod_base = OTHER; note = 2'-deoxyguanosine 3'-phosphorothioate
  modified_base 9: mod_base = OTHER; note = 2'-deoxyadenosine 3'-phosphorothioate
  modified_base 10: mod_base = OTHER; note = 2'-deoxyguanosine 3'-phosphorothioate
  modified_base 11: mod_base = OTHER; note = 2'-deoxythymidine 3'-phosphorothioate
  modified_base 12: mod_base = OTHER; note = 5-methyl-2'-deoxycytidine 3'-phosphorothioate
  modified_base 13: mod_base = OTHER; note = 2'-deoxyguanosine 3'-phosphorothioate
  modified_base 14..15: mod_base = OTHER; note = cEt adenosine 3'-phosphorothioate
  modified_base 16: mod_base = OTHER; note = cEt guanosine
ggccccggagtcgaag

SEQ ID NO: 1421 - DNA, 16 bp, synthetic construct
  source 1..16: mol_type = other DNA
  modified_base 1..3: mod_base = OTHER; note = 2'-O-methoxyethyl guanosine 3'-phosphorothioate
  modified_base 4..7: mod_base = OTHER; note = 5-methyl-2'-deoxycytidine 3'-phosphorothioate
  modified_base 8..9: mod_base = OTHER; note = 2'-deoxyguanosine 3'-phosphorothioate
  modified_base 10: mod_base = OTHER; note = 2'-deoxyadenosine 3'-phosphorothioate
  modified_base 11: mod_base = OTHER; note = 2'-deoxyguanosine 3'-phosphorothioate
  modified_base 12: mod_base = OTHER; note = 2'-deoxythymidine 3'-phosphorothioate
  modified_base 13: mod_base = OTHER; note = 5-methyl-2'-deoxycytidine 3'-phosphorothioate
  modified_base 14: mod_base = OTHER; note = cEt guanosine 3'-phosphorothioate
  modified_base 15: mod_base = OTHER; note = cEt adenosine 3'-phosphorothioate
  modified_base 16: mod_base = OTHER; note = cEt adenosine
gggccccggagtcgaa

SEQ ID NO: 1422 - DNA, 16 bp, synthetic construct
  source 1..16: mol_type = other DNA
  modified_base 1: mod_base = OTHER; note = 2'-O-methoxyethyl adenosine 3'-phosphorothioate
  modified_base 2: mod_base = OTHER; note = 2'-O-methoxyethyl 5-methylcytidine 3'-phosphorothioate
  modified_base 3: mod_base = OTHER; note = 2'-O-methoxyethyl adenosine 3'-phosphorothioate
  modified_base 4: mod_base = OTHER; note = 2'-deoxyadenosine 3'-phosphorothioate
  modified_base 5: mod_base = OTHER; note = 2'-deoxythymidine 3'-phosphorothioate
  modified_base 6..8: mod_base = OTHER; note = 2'-deoxyadenosine 3'-phosphorothioate
  modified_base 9: mod_base = OTHER; note = 2'-deoxythymidine 3'-phosphorothioate
  modified_base 10: mod_base = OTHER; note = 2'-deoxyadenosine 3'-phosphorothioate
  modified_base 11..12: mod_base = OTHER; note = 5-methyl-2'-deoxycytidine 3'-phosphorothioate
  modified_base 13: mod_base = OTHER; note = 2'-deoxyguanosine 3'-phosphorothioate
  modified_base 14: mod_base = OTHER; note = cEt adenosine 3'-phosphorothioate
  modified_base 15: mod_base = OTHER; note = cEt guanosine 3'-phosphorothioate
  modified_base 16: mod_base = OTHER; note = cEt guanosine
acaataaataccgagg

SEQ ID NO: 1423 - DNA, 16 bp, synthetic construct
  source 1..16: mol_type = other DNA
  modified_base 1: mod_base = OTHER; note = 2'-O-methoxyethyl 5-methylcytidine 3'-phosphorothioate
  modified_base 2..3: mod_base = OTHER; note = 2'-O-methoxyethyl guanosine 3'-phosphorothioate
  modified_base 4..5: mod_base = OTHER; note = 2'-deoxythymidine 3'-phosphorothioate
  modified_base 6: mod_base = OTHER; note = 2'-deoxyguanosine 3'-phosphorothioate
  modified_base 7: mod_base = OTHER; note = 2'-deoxythymidine 3'-phosphorothioate
  modified_base 8: mod_base = OTHER; note = 2'-deoxyguanosine 3'-phosphorothioate
  modified_base 9..10: mod_base = OTHER; note = 2'-deoxyadenosine 3'-phosphorothioate
  modified_base 11: mod_base = OTHER; note = 5-methyl-2'-deoxycytidine 3'-phosphorothioate
  modified_base 12: mod_base = OTHER; note = 2'-deoxythymidine 3'-phosphorothioate
  modified_base 13: mod_base = OTHER; note = 2'-deoxyguanosine 3'-phosphorothioate
  modified_base 14: mod_base = OTHER; note = cEt guanosine 3'-phosphorothioate
  modified_base 15: mod_base = OTHER; note = cEt 5-methylcytidine 3'-phosphorothioate
  modified_base 16: mod_base = OTHER; note = cEt adenosine
cggttgtgaactggca

SEQ ID NO: 1424 - DNA, 16 bp, synthetic construct
  source 1..16: mol_type = other DNA
  modified_base 1: mod_base = OTHER; note = 2'-O-methoxyethyl adenosine 3'-phosphorothioate
  modified_base 2: mod_base = OTHER; note = 2'-O-methoxyethyl guanosine 3'-phosphorothioate
  modified_base 3: mod_base = OTHER; note = 2'-O-methoxyethyl 5-methylcytidine 3'-phosphorothioate
  modified_base 4..5: mod_base = OTHER; note = 2'-deoxyguanosine 3'-phosphorothioate
  modified_base 6..7: mod_base = OTHER; note = 2'-deoxythymidine 3'-phosphorothioate
  modified_base 8: mod_base = OTHER; note = 2'-deoxyguanosine 3'-phosphorothioate
  modified_base 9: mod_base = OTHER; note = 2'-deoxythymidine 3'-phosphorothioate
  modified_base 10: mod_base = OTHER; note = 2'-deoxyguanosine 3'-phosphorothioate
  modified_base 11..12: mod_base = OTHER; note = 2'-deoxyadenosine 3'-phosphorothioate
  modified_base 13: mod_base = OTHER; note = 5-methyl-2'-deoxycytidine 3'-phosphorothioate
  modified_base 14: mod_base = OTHER; note = cEt thymidine 3'-phosphorothioate
  modified_base 15: mod_base = OTHER; note = cEt guanosine 3'-phosphorothioate
  modified_base 16: mod_base = OTHER; note = cEt guanosine
agcggttgtgaactgg

SEQ ID NO: 1425 - DNA, 16 bp, synthetic construct
  source 1..16: mol_type = other DNA
  modified_base 1: mod_base = OTHER; note = 2'-O-methoxyethyl guanosine 3'-phosphorothioate
  modified_base 2: mod_base = OTHER; note = 2'-O-methoxyethyl 5-methylcytidine 3'-phosphorothioate
  modified_base 3: mod_base = OTHER; note = 2'-O-methoxyethyl adenosine 3'-phosphorothioate
  modified_base 4: mod_base = OTHER; note = 5-methyl-2'-deoxycytidine 3'-phosphorothioate
  modified_base 5..7: mod_base = OTHER; note = 2'-deoxythymidine 3'-phosphorothioate
  modified_base 8: mod_base = OTHER; note = 2'-deoxyguanosine 3'-phosphorothioate
  modified_base 9: mod_base = OTHER; note = 5-methyl-2'-deoxycytidine 3'-phosphorothioate
  modified_base 10: mod_base = OTHER; note = 2'-deoxyguanosine 3'-phosphorothioate
  modified_base 11..12: mod_base = OTHER; note = 2'-deoxyadenosine 3'-phosphorothioate
  modified_base 13: mod_base = OTHER; note = 5-methyl-2'-deoxycytidine 3'-phosphorothioate
  modified_base 14: mod_base = OTHER; note = cEt 5-methylcytidine 3'-phosphorothioate
  modified_base 15: mod_base = OTHER; note = cEt adenosine 3'-phosphorothioate
  modified_base 16: mod_base = OTHER; note = cEt adenosine
gcactttgcgaaccaa

SEQ ID NO: 1426 - DNA, 16 bp, synthetic construct
  source 1..16: mol_type = other DNA
  modified_base 1: mod_base = OTHER; note = 2'-O-methoxyethyl thymidine 3'-phosphorothioate
  modified_base 2: mod_base = OTHER; note = 2'-O-methoxyethyl guanosine 3'-phosphorothioate
  modified_base 3: mod_base = OTHER; note = 2'-O-methoxyethyl 5-methylcytidine 3'-phosphorothioate
  modified_base 4: mod_base = OTHER; note = 2'-deoxyadenosine 3'-phosphorothioate
  modified_base 5: mod_base = OTHER; note = 5-methyl-2'-deoxycytidine 3'-phosphorothioate
  modified_base 6..8: mod_base = OTHER; note = 2'-deoxythymidine 3'-phosphorothioate
  modified_base 9: mod_base = OTHER; note = 2'-deoxyguanosine 3'-phosphorothioate
  modified_base 10: mod_base = OTHER; note = 5-methyl-2'-deoxycytidine 3'-phosphorothioate
  modified_base 11: mod_base = OTHER; note = 2'-deoxyguanosine 3'-phosphorothioate
  modified_base 12..13: mod_base = OTHER; note = 2'-deoxyadenosine 3'-phosphorothioate
  modified_base 14..15: mod_base = OTHER; note = cEt 5-methylcytidine 3'-phosphorothioate
  modified_base 16: mod_base = OTHER; note = cEt adenosine
tgcactttgcgaacca

SEQ ID NO: 1427 - DNA, 16 bp, synthetic construct
  source 1..16: mol_type = other DNA
  modified_base 1: mod_base = OTHER; note = 2'-O-methoxyethyl adenosine 3'-phosphorothioate
  modified_base 2: mod_base = OTHER; note = 2'-O-methoxyethyl 5-methylcytidine 3'-phosphorothioate
  modified_base 3: mod_base = OTHER; note = 2'-O-methoxyethyl thymidine 3'-phosphorothioate
  modified_base 4..5: mod_base = OTHER; note = 2'-deoxythymidine 3'-phosphorothioate
  modified_base 6: mod_base = OTHER; note = 2'-deoxyguanosine 3'-phosphorothioate
  modified_base 7: mod_base = OTHER; note = 5-methyl-2'-deoxycytidine 3'-phosphorothioate
  modified_base 8: mod_base = OTHER; note = 2'-deoxyguanosine 3'-phosphorothioate
  modified_base 9..10: mod_base = OTHER; note = 2'-deoxyadenosine 3'-phosphorothioate
  modified_base 11..12: mod_base = OTHER; note = 5-methyl-2'-deoxycytidine 3'-phosphorothioate
  modified_base 13: mod_base = OTHER; note = 2'-deoxyadenosine 3'-phosphorothioate
  modified_base 14: mod_base = OTHER; note = cEt adenosine 3'-phosphorothioate
  modified_base 15: mod_base = OTHER; note = cEt 5-methylcytidine 3'-phosphorothioate
  modified_base 16: mod_base = OTHER; note = cEt guanosine
actttgcgaaccaacg

SEQ ID NO: 1428 - DNA, 16 bp, synthetic construct
  source 1..16: mol_type = other DNA
  modified_base 1..3: mod_base = OTHER; note = 2'-O-methoxyethyl adenosine 3'-phosphorothioate
  modified_base 4: mod_base = OTHER; note = 2'-deoxyguanosine 3'-phosphorothioate
  modified_base 5: mod_base = OTHER; note = 5-methyl-2'-deoxycytidine 3'-phosphorothioate
  modified_base 6..8: mod_base = OTHER; note = 2'-deoxythymidine 3'-phosphorothioate
  modified_base 9: mod_base = OTHER; note = 2'-deoxyguanosine 3'-phosphorothioate
  modified_base 10: mod_base = OTHER; note = 5-methyl-2'-deoxycytidine 3'-phosphorothioate
  modified_base 11: mod_base = OTHER; note = 2'-deoxyadenosine 3'-phosphorothioate
  modified_base 12: mod_base = OTHER; note = 5-methyl-2'-deoxycytidine 3'-phosphorothioate
  modified_base 13: mod_base = OTHER; note = 2'-deoxythymidine 3'-phosphorothioate
  modified_base 14..15: mod_base = OTHER; note = cEt thymidine 3'-phosphorothioate
  modified_base 16: mod_base = OTHER; note = cEt guanosine
aaagctttgcactttg

SEQ ID NO: 1429 - DNA, 16 bp, synthetic construct
  source 1..16: mol_type = other DNA
  modified_base 1: mod_base = OTHER; note = 2'-O-methoxyethyl thymidine 3'-phosphorothioate
  modified_base 2..3: mod_base = OTHER; note = 2'-O-methoxyethyl 5-methylcytidine 3'-phosphorothioate
  modified_base 4: mod_base = OTHER; note = 5-methyl-2'-deoxycytidine 3'-phosphorothioate
  modified_base 5: mod_base = OTHER; note = 2'-deoxyguanosine 3'-phosphorothioate
  modified_base 6: mod_base = OTHER; note = 2'-deoxyadenosine 3'-phosphorothioate
  modified_base 7: mod_base = OTHER; note = 2'-deoxyguanosine 3'-phosphorothioate
  modified_base 8: mod_base = OTHER; note = 2'-deoxythymidine 3'-phosphorothioate
  modified_base 9..10: mod_base = OTHER; note = 2'-deoxyadenosine 3'-phosphorothioate
  modified_base 11: mod_base = OTHER; note = 2'-deoxyguanosine 3'-phosphorothioate
  modified_base 12: mod_base = OTHER; note = 5-methyl-2'-deoxycytidine 3'-phosphorothioate
  modified_base 13: mod_base = OTHER; note = 2'-deoxyadenosine 3'-phosphorothioate
  modified_base 14..15: mod_base = OTHER; note = cEt guanosine 3'-phosphorothioate
  modified_base 16: mod_base = OTHER; note = cEt 5-methylcytidine
tcccgagtaagcaggc

SEQ ID NO: 1430 - DNA, 16 bp, synthetic construct
  source 1..16: mol_type = other DNA
  modified_base 1: mod_base = OTHER; note = 2'-O-methoxyethyl guanosine 3'-phosphorothioate
  modified_base 2: mod_base = OTHER; note = 2'-O-methoxyethyl 5-methylcytidine 3'-phosphorothioate
  modified_base 3: mod_base = OTHER; note = 2'-O-methoxyethyl adenosine 3'-phosphorothioate
  modified_base 4: mod_base = OTHER; note = 2'-deoxyguanosine 3'-phosphorothioate
  modified_base 5: mod_base = OTHER; note = 5-methyl-2'-deoxycytidine 3'-phosphorothioate
  modified_base 6: mod_base = OTHER; note = 2'-deoxyguanosine 3'-phosphorothioate
  modified_base 7: mod_base = OTHER; note = 5-methyl-2'-deoxycytidine 3'-phosphorothioate
  modified_base 8..9: mod_base = OTHER; note = 2'-deoxyadenosine 3'-phosphorothioate
  modified_base 10: mod_base = OTHER; note = 2'-deoxyguanosine 3'-phosphorothioate
  modified_base 11: mod_base = OTHER; note = 2'-deoxythymidine 3'-phosphorothioate
  modified_base 12: mod_base = OTHER; note = 2'-deoxyguanosine 3'-phosphorothioate
  modified_base 13: mod_base = OTHER; note = 2'-deoxyadenosine 3'-phosphorothioate
  modified_base 14..15: mod_base = OTHER; note = cEt guanosine 3'-phosphorothioate
  modified_base 16: mod_base = OTHER; note = cEt adenosine
gcagcgcaagtgagga

SEQ ID NO: 1431 - DNA, 16 bp, synthetic construct
  source 1..16: mol_type = other DNA
  modified_base 1: mod_base = OTHER; note = 2'-O-methoxyethyl guanosine 3'-phosphorothioate
  modified_base 2: mod_base = OTHER; note = 2'-O-methoxyethyl thymidine 3'-phosphorothioate
  modified_base 3: mod_base = OTHER; note = 2'-O-methoxyethyl 5-methylcytidine 3'-phosphorothioate
  modified_base 4: mod_base = OTHER; note = 2'-deoxyadenosine 3'-phosphorothioate
  modified_base 5: mod_base = OTHER; note = 2'-deoxyguanosine 3'-phosphorothioate
  modified_base 6: mod_base = OTHER; note = 5-methyl-2'-deoxycytidine 3'-phosphorothioate
  modified_base 7: mod_base = OTHER; note = 2'-deoxyguanosine 3'-phosphorothioate
  modified_base 8: mod_base = OTHER; note = 2'-deoxyadenosine 3'-phosphorothioate
  modified_base 9: mod_base = OTHER; note = 2'-deoxyguanosine 3'-phosphorothioate
  modified_base 10: mod_base = OTHER; note = 2'-deoxythymidine 3'-phosphorothioate
  modified_base 11: mod_base = OTHER; note = 5-methyl-2'-deoxycytidine 3'-phosphorothioate
  modified_base 12..13: mod_base = OTHER; note = 2'-deoxyguanosine 3'-phosphorothioate
  modified_base 14: mod_base = OTHER; note = cEt adenosine 3'-phosphorothioate
  modified_base 15: mod_base = OTHER; note = cEt guanosine 3'-phosphorothioate
  modified_base 16: mod_base = OTHER; note = cEt guanosine
gtcagcgagtcggagg

SEQ ID NO: 1432 - DNA, 16 bp, synthetic construct
  source 1..16: mol_type = other DNA
  modified_base 1..2: mod_base = OTHER; note = 2'-O-methoxyethyl 5-methylcytidine 3'-phosphorothioate
  modified_base 3: mod_base = OTHER; note = 2'-O-methoxyethyl thymidine 3'-phosphorothioate
  modified_base 4: mod_base = OTHER; note = 2'-deoxyguanosine 3'-phosphorothioate
  modified_base 5: mod_base = OTHER; note = 2'-deoxythymidine 3'-phosphorothioate
  modified_base 6: mod_base = OTHER; note = 5-methyl-2'-deoxycytidine 3'-phosphorothioate
  modified_base 7: mod_base = OTHER; note = 2'-deoxyadenosine 3'-phosphorothioate
  modified_base 8: mod_base = OTHER; note = 2'-deoxyguanosine 3'-phosphorothioate
  modified_base 9: mod_base = OTHER; note = 5-methyl-2'-deoxycytidine 3'-phosphorothioate
  modified_base 10: mod_base = OTHER; note = 2'-deoxyguanosine 3'-phosphorothioate
  modified_base 11: mod_base = OTHER; note = 2'-deoxyadenosine 3'-phosphorothioate
  modified_base 12: mod_base = OTHER; note = 2'-deoxyguanosine 3'-phosphorothioate
  modified_base 13: mod_base = OTHER; note = 2'-deoxythymidine 3'-phosphorothioate
  modified_base 14: mod_base = OTHER; note = cEt 5-methylcytidine 3'-phosphorothioate
  modified_base 15: mod_base = OTHER; note = cEt guanosine 3'-phosphorothioate
  modified_base 16: mod_base = OTHER; note = cEt guanosine
cctgtcagcgagtcgg

SEQ ID NO: 1433 - DNA, 16 bp, synthetic construct
  source 1..16: mol_type = other DNA
  modified_base 1: mod_base = OTHER; note = 2'-O-methoxyethyl guanosine 3'-phosphorothioate
  modified_base 2..3: mod_base = OTHER; note = 2'-O-methoxyethyl 5-methylcytidine 3'-phosphorothioate
  modified_base 4: mod_base = OTHER; note = 2'-deoxythymidine 3'-phosphorothioate
  modified_base 5: mod_base = OTHER; note = 2'-deoxyguanosine 3'-phosphorothioate
  modified_base 6: mod_base = OTHER; note = 2'-deoxythymidine 3'-phosphorothioate
  modified_base 7: mod_base = OTHER; note = 5-methyl-2'-deoxycytidine 3'-phosphorothioate
  modified_base 8: mod_base = OTHER; note = 2'-deoxyadenosine 3'-phosphorothioate
  modified_base 9: mod_base = OTHER; note = 2'-deoxyguanosine 3'-phosphorothioate
  modified_base 10: mod_base = OTHER; note = 5-methyl-2'-deoxycytidine 3'-phosphorothioate
  modified_base 11: mod_base = OTHER; note = 2'-deoxyguanosine 3'-phosphorothioate
  modified_base 12: mod_base = OTHER; note = 2'-deoxyadenosine 3'-phosphorothioate
  modified_base 13: mod_base = OTHER; note = 2'-deoxyguanosine 3'-phosphorothioate
  modified_base 14: mod_base = OTHER; note = cEt thymidine 3'-phosphorothioate
  modified_base 15: mod_base = OTHER; note = cEt 5-methylcytidine 3'-phosphorothioate
  modified_base 16: mod_base = OTHER; note = cEt guanosine
gcctgtcagcgagtcg

SEQ ID NO: 1434 - DNA, 16 bp, synthetic construct
  source 1..16: mol_type = other DNA
  modified_base 1: mod_base = OTHER; note = 2'-O-methoxyethyl adenosine 3'-phosphorothioate
  modified_base 2: mod_base = OTHER; note = 2'-O-methoxyethyl guanosine 3'-phosphorothioate
  modified_base 3: mod_base = OTHER; note = 2'-O-methoxyethyl 5-methylcytidine 3'-phosphorothioate
  modified_base 4: mod_base = OTHER; note = 5-methyl-2'-deoxycytidine 3'-phosphorothioate
  modified_base 5: mod_base = OTHER; note = 2'-deoxythymidine 3'-phosphorothioate
  modified_base 6: mod_base = OTHER; note = 2'-deoxyguanosine 3'-phosphorothioate
  modified_base 7: mod_base = OTHER; note = 2'-deoxythymidine 3'-phosphorothioate
  modified_base 8: mod_base = OTHER; note = 5-methyl-2'-deoxycytidine 3'-phosphorothioate
  modified_base 9: mod_base = OTHER; note = 2'-deoxyadenosine 3'-phosphorothioate
  modified_base 10: mod_base = OTHER; note = 2'-deoxyguanosine 3'-phosphorothioate
  modified_base 11: mod_base = OTHER; note = 5-methyl-2'-deoxycytidine 3'-phosphorothioate
  modified_base 12: mod_base = OTHER; note = 2'-deoxyguanosine 3'-phosphorothioate
  modified_base 13: mod_base = OTHER; note = 2'-deoxyadenosine 3'-phosphorothioate
  modified_base 14: mod_base = OTHER; note = cEt guanosine 3'-phosphorothioate
  modified_base 15: mod_base = OTHER; note = cEt thymidine 3'-phosphorothioate
  modified_base 16: mod_base = OTHER; note = cEt 5-methylcytidine
agcctgtcagcgagtc

SEQ ID NO: 1435 - DNA, 16 bp, synthetic construct
  source 1..16: mol_type = other DNA
  modified_base 1..3: mod_base = OTHER; note = 2'-O-methoxyethyl guanosine 3'-phosphorothioate
  modified_base 4: mod_base = OTHER; note = 2'-deoxythymidine 3'-phosphorothioate
  modified_base 5: mod_base = OTHER; note = 5-methyl-2'-deoxycytidine 3'-phosphorothioate
  modified_base 6: mod_base = OTHER; note = 2'-deoxythymidine 3'-phosphorothioate
  modified_base 7: mod_base = OTHER; note = 5-methyl-2'-deoxycytidine 3'-phosphorothioate
  modified_base 8: mod_base = OTHER; note = 2'-deoxyadenosine 3'-phosphorothioate
  modified_base 9: mod_base = OTHER; note = 2'-deoxyguanosine 3'-phosphorothioate
  modified_base 10: mod_base = OTHER; note = 2'-deoxythymidine 3'-phosphorothioate
  modified_base 11: mod_base = OTHER; note = 2'-deoxyguanosine 3'-phosphorothioate
  modified_base 12: mod_base = OTHER; note = 5-methyl-2'-deoxycytidine 3'-phosphorothioate
  modified_base 13: mod_base = OTHER; note = 2'-deoxyadenosine 3'-phosphorothioate
  modified_base 14: mod_base = OTHER; note = cEt thymidine 3'-phosphorothioate
  modified_base 15: mod_base = OTHER; note = cEt 5-methylcytidine 3'-phosphorothioate
  modified_base 16: mod_base = OTHER; note = cEt 5-methylcytidine
gggtctcagtgcatcc

SEQ ID NO: 1436 - DNA, 16 bp, synthetic construct
  source 1..16: mol_type = other DNA
  modified_base 1: mod_base = OTHER; note = 2'-O-methoxyethyl adenosine 3'-phosphorothioate
  modified_base 2..3: mod_base = OTHER; note = 2'-O-methoxyethyl guanosine 3'-phosphorothioate
  modified_base 4..8: mod_base = OTHER; note = 2'-deoxythymidine 3'-phosphorothioate
  modified_base 9..10: mod_base = OTHER; note = 5-methyl-2'-deoxycytidine 3'-phosphorothioate
  modified_base 11: mod_base = OTHER; note = 2'-deoxyadenosine 3'-phosphorothioate
  modified_base 12: mod_base = OTHER; note = 2'-deoxyguanosine 3'-phosphorothioate
  modified_base 13: mod_base = OTHER; note = 2'-deoxyadenosine 3'-phosphorothioate
  modified_base 14..15: mod_base = OTHER; note = cEt guanosine 3'-phosphorothioate
  modified_base 16: mod_base = OTHER; note = cEt 5-methylcytidine
aggtttttccagaggc

SEQ ID NO: 1437 - DNA, 16 bp, synthetic construct
  source 1..16: mol_type = other DNA
  modified_base 1..2: mod_base = OTHER; note = 2'-O-methoxyethyl adenosine 3'-phosphorothioate
  modified_base 3: mod_base = OTHER; note = 2'-O-methoxyethyl guanosine 3'-phosphorothioate
  modified_base 4: mod_base = OTHER; note = 2'-deoxyguanosine 3'-phosphorothioate
  modified_base 5..9: mod_base = OTHER; note = 2'-deoxythymidine 3'-phosphorothioate
  modified_base 10..11: mod_base = OTHER; note = 5-methyl-2'-deoxycytidine 3'-phosphorothioate
  modified_base 12: mod_base = OTHER; note = 2'-deoxyadenosine 3'-phosphorothioate
  modified_base 13: mod_base = OTHER; note = 2'-deoxyguanosine 3'-phosphorothioate
  modified_base 14: mod_base = OTHER; note = cEt adenosine 3'-phosphorothioate
  modified_base 15: mod_base = OTHER; note = cEt guanosine 3'-phosphorothioate
  modified_base 16: mod_base = OTHER; note = cEt guanosine
aaggtttttccagagg

SEQ ID NO: 1438 - DNA, 16 bp, synthetic construct
  source 1..16: mol_type = other DNA
  modified_base 1..2: mod_base = OTHER; note = 2'-O-methoxyethyl guanosine 3'-phosphorothioate
  modified_base 3: mod_base = OTHER; note = 2'-O-methoxyethyl thymidine 3'-phosphorothioate
  modified_base 4: mod_base = OTHER; note = 5-methyl-2'-deoxycytidine 3'-phosphorothioate
  modified_base 5: mod_base = OTHER; note = 2'-deoxyadenosine 3'-phosphorothioate
  modified_base 6: mod_base = OTHER; note = 5-methyl-2'-deoxycytidine 3'-phosphorothioate
  modified_base 7: mod_base = OTHER; note = 2'-deoxythymidine 3'-phosphorothioate
  modified_base 8: mod_base = OTHER; note = 2'-deoxyguanosine 3'-phosphorothioate
  modified_base 9: mod_base = OTHER; note = 5-methyl-2'-deoxycytidine 3'-phosphorothioate
  modified_base 10: mod_base = OTHER; note = 2'-deoxythymidine 3'-phosphorothioate
  modified_base 11..13: mod_base = OTHER; note = 2'-deoxyguanosine 3'-phosphorothioate
  modified_base 14: mod_base = OTHER; note = cEt thymidine 3'-phosphorothioate
  modified_base 15: mod_base = OTHER; note = cEt 5-methylcytidine 3'-phosphorothioate
  modified_base 16: mod_base = OTHER; note = cEt 5-methylcytidine
ggtcactgctgggtcc

SEQ ID NO: 1439 - DNA, 16 bp, synthetic construct
  source 1..16: mol_type = other DNA
  modified_base 1: mod_base = OTHER; note = 2'-O-methoxyethyl guanosine 3'-phosphorothioate
  modified_base 2: mod_base = OTHER; note = 2'-O-methoxyethyl thymidine 3'-phosphorothioate
  modified_base 3: mod_base = OTHER; note = 2'-O-methoxyethyl guanosine 3'-phosphorothioate
  modified_base 4: mod_base = OTHER; note = 2'-deoxyguanosine 3'-phosphorothioate
  modified_base 5..7: mod_base = OTHER; note = 2'-deoxythymidine 3'-phosphorothioate
  modified_base 8: mod_base = OTHER; note = 5-methyl-2'-deoxycytidine 3'-phosphorothioate
  modified_base 9: mod_base = OTHER; note = 2'-deoxythymidine 3'-phosphorothioate
  modified_base 10: mod_base = OTHER; note = 2'-deoxyguanosine 3'-phosphorothioate
  modified_base 11: mod_base = OTHER; note = 2'-deoxythymidine 3'-phosphorothioate
  modified_base 12: mod_base = OTHER; note = 5-methyl-2'-deoxycytidine 3'-phosphorothioate
  modified_base 13: mod_base = OTHER; note = 2'-deoxythymidine 3'-phosphorothioate
  modified_base 14: mod_base = OTHER; note = cEt guanosine 3'-phosphorothioate
  modified_base 15: mod_base = OTHER; note = cEt 5-methylcytidine 3'-phosphorothioate
  modified_base 16: mod_base = OTHER; note = cEt thymidine
gtggtttctgtctgct

SEQ ID NO: 1440 - DNA, 16 bp, synthetic construct
  source 1..16: mol_type = other DNA
  modified_base 1: mod_base = OTHER; note = 2'-O-methoxyethyl 5-methylcytidine 3'-phosphorothioate
  modified_base 2: mod_base = OTHER; note = 2'-O-methoxyethyl guanosine 3'-phosphorothioate
  modified_base 3: mod_base = OTHER; note = 2'-O-methoxyethyl thymidine 3'-phosphorothioate
  modified_base 4..5: mod_base = OTHER; note = 2'-deoxyguanosine 3'-phosphorothioate
  modified_base 6..8: mod_base = OTHER; note = 2'-deoxythymidine 3'-phosphorothioate
  modified_base 9: mod_base = OTHER; note = 5-methyl-2'-deoxycytidine 3'-phosphorothioate
  modified_base 10: mod_base = OTHER; note = 2'-deoxythymidine 3'-phosphorothioate
  modified_base 11: mod_base = OTHER; note = 2'-deoxyguanosine 3'-phosphorothioate
  modified_base 12: mod_base = OTHER; note = 2'-deoxythymidine 3'-phosphorothioate
  modified_base 13: mod_base = OTHER; note = 5-methyl-2'-deoxycytidine 3'-phosphorothioate
  modified_base 14: mod_base = OTHER; note = cEt thymidine 3'-phosphorothioate
  modified_base 15: mod_base = OTHER; note = cEt guanosine 3'-phosphorothioate
  modified_base 16: mod_base = OTHER; note = cEt 5-methylcytidine
cgtggtttctgtctgc

SEQ ID NO: 1441 - DNA, 17 bp, synthetic construct
  source 1..17: mol_type = other DNA
  modified_base 1: mod_base = OTHER; note = 2'-O-methoxyethyl 5-methylcytidine 3'-phosphorothioate
  modified_base 2..3: mod_base = OTHER; note = 2'-O-methoxyethyl guanosine 3'-phosphorothioate
  modified_base 4: mod_base = OTHER; note = cEt adenosine 3'-phosphorothioate
  modified_base 5: mod_base = OTHER; note = cEt guanosine 3'-phosphorothioate
  modified_base 6: mod_base = OTHER; note = 5-methyl-2'-deoxycytidine 3'-phosphorothioate
  modified_base 7..8: mod_base = OTHER; note = 2'-deoxyguanosine 3'-phosphorothioate
  modified_base 9..10: mod_base = OTHER; note = 2'-deoxythymidine 3'-phosphorothioate
  modified_base 11: mod_base = OTHER; note = 2'-deoxyguanosine 3'-phosphorothioate
  modified_base 12: mod_base = OTHER; note = 2'-deoxythymidine 3'-phosphorothioate
  modified_base 13: mod_base = OTHER; note = cEt guanosine 3'-phosphorothioate
  modified_base 14: mod_base = OTHER; note = cEt adenosine 3'-phosphorothioate
  modified_base 15: mod_base = OTHER; note = 2'-O-methoxyethyl adenosine 3'-phosphorothioate
  modified_base 16: mod_base = OTHER; note = 2'-O-methoxyethyl 5-methylcytidine 3'-phosphorothioate
  modified_base 17: mod_base = OTHER; note = 2'-O-methoxyethyl thymidine
cggagcggttgtgaact

SEQ ID NO: 1442 - DNA, 17 bp, synthetic construct
  source 1..17: mol_type = other DNA
  modified_base 1: mod_base = OTHER; note = 2'-O-methoxyethyl adenosine 3'-phosphorothioate
  modified_base 2: mod_base = OTHER; note = 2'-O-methoxyethyl 5-methylcytidine 3'-phosphorothioate
  modified_base 3: mod_base = OTHER; note = 2'-O-methoxyethyl adenosine 3'-phosphorothioate
  modified_base 4: mod_base = OTHER; note = cEt adenosine 3'-phosphorothioate
  modified_base 5: mod_base = OTHER; note = cEt thymidine 3'-phosphorothioate
  modified_base 6..8: mod_base = OTHER; note = 2'-deoxyadenosine 3'-phosphorothioate
  modified_base 9: mod_base = OTHER; note = 2'-deoxythymidine 3'-phosphorothioate
  modified_base 10: mod_base = OTHER; note = 2'-deoxyadenosine 3'-phosphorothioate
  modified_base 11..12: mod_base = OTHER; note = 5-methyl-2'-deoxycytidine 3'-phosphorothioate
  modified_base 13: mod_base = OTHER; note = cEt guanosine 3'-phosphorothioate
  modified_base 14: mod_base = OTHER; note = cEt adenosine 3'-phosphorothioate
  modified_base 15..16: mod_base = OTHER; note = 2'-O-methoxyethyl guanosine 3'-phosphorothioate
  modified_base 17: mod_base = OTHER; note = 2'-O-methoxyethyl adenosine
acaataaataccgagga

SEQ ID NO: 1443 - DNA, 20 bp, synthetic construct
  source 1..20: mol_type = other DNA
  modified_base 1: mod_base = OTHER; note = 2'-O-methoxyethyl 5-methylcytidine 3'-phosphorothioate
  modified_base 2..3: mod_base = OTHER; note = 2'-O-methoxyethyl guanosine 3'-phosphorothioate
  modified_base 4: mod_base = OTHER; note = 2'-O-methoxyethyl adenosine 3'-phosphorothioate
  modified_base 5: mod_base = OTHER; note = 2'-O-methoxyethyl guanosine 3'-phosphorothioate
  modified_base 6: mod_base = OTHER; note = 5-methyl-2'-deoxycytidine 3'-phosphorothioate
  modified_base 7..8: mod_base = OTHER; note = 2'-deoxyguanosine 3'-phosphorothioate
  modified_base 9..10: mod_base = OTHER; note = 2'-deoxythymidine 3'-phosphorothioate
  modified_base 11: mod_base = OTHER; note = 2'-deoxyguanosine 3'-phosphorothioate
  modified_base 12: mod_base = OTHER; note = 2'-deoxythymidine 3'-phosphorothioate
  modified_base 13: mod_base = OTHER; note = 2'-deoxyguanosine 3'-phosphorothioate
  modified_base 14..15: mod_base = OTHER; note = 2'-deoxyadenosine 3'-phosphorothioate
  modified_base 16: mod_base = OTHER; note = 2'-O-methoxyethyl 5-methylcytidine 3'-phosphorothioate
  modified_base 17: mod_base = OTHER; note = 2'-O-methoxyethyl thymidine 3'-phosphorothioate
  modified_base 18..19: mod_base = OTHER; note = 2'-O-methoxyethyl guanosine 3'-phosphorothioate
  modified_base 20: mod_base = OTHER; note = 2'-O-methoxyethyl 5-methylcytidine
cggagcggttgtgaactggc

SEQ ID NO: 1444 - DNA, 20 bp, synthetic construct
  source 1..20: mol_type = other DNA
  modified_base 1: mod_base = OTHER; note = 2'-O-methoxyethyl guanosine 3'-phosphorothioate
  modified_base 2: mod_base = OTHER; note = 2'-O-methoxyethyl 5-methylcytidine 3'-phosphorothioate
  modified_base 3: mod_base = OTHER; note = 2'-O-methoxyethyl guanosine 3'-phosphorothioate
  modified_base 4: mod_base = OTHER; note = 2'-O-methoxyethyl 5-methylcytidine 3'-phosphorothioate
  modified_base 5: mod_base = OTHER; note = 2'-O-methoxyethyl adenosine 3'-phosphorothioate
  modified_base 6..7: mod_base = OTHER; note = 5-methyl-2'-deoxycytidine 3'-phosphorothioate
  modified_base 8..9: mod_base = OTHER; note = 2'-deoxythymidine 3'-phosphorothioate
  modified_base 10..12: mod_base = OTHER; note = 5-methyl-2'-deoxycytidine 3'-phosphorothioate
  modified_base 13: mod_base = OTHER; note = 2'-deoxyguanosine 3'-phosphorothioate
  modified_base 14..15: mod_base = OTHER; note = 2'-deoxyadenosine 3'-phosphorothioate
  modified_base 16: mod_base = OTHER; note = 2'-O-methoxyethyl thymidine 3'-phosphorothioate
  modified_base 17: mod_base = OTHER; note = 2'-O-methoxyethyl guanosine 3'-phosphorothioate
  modified_base 18: mod_base = OTHER; note = 2'-O-methoxyethyl thymidine 3'-phosphorothioate
  modified_base 19: mod_base = OTHER; note = 2'-O-methoxyethyl 5-methylcytidine 3'-phosphorothioate
  modified_base 20: mod_base = OTHER; note = 2'-O-methoxyethyl 5-methylcytidine
gcgcaccttcccgaatgtcc

SEQ ID NO: 1445 - DNA, 20 bp, synthetic construct
  source 1..20: mol_type = other DNA
  modified_base 1..2: mod_base = OTHER; note = 2'-O-methoxyethyl thymidine 3'-phosphorothioate
  modified_base 3: mod_base = OTHER; note = 2'-O-methoxyethyl guanosine 3'-phosphorothioate
  modified_base 4: mod_base = OTHER; note = 2'-O-methoxyethyl 5-methylcytidine 3'-phosphorothioate
  modified_base 5: mod_base = OTHER; note = 2'-O-methoxyethyl adenosine 3'-phosphorothioate
  modified_base 6: mod_base = OTHER; note = 5-methyl-2'-deoxycytidine 3'-phosphorothioate
  modified_base 7..9: mod_base = OTHER; note = 2'-deoxythymidine 3'-phosphorothioate
  modified_base 10: mod_base = OTHER; note = 2'-deoxyguanosine 3'-phosphorothioate
  modified_base 11: mod_base = OTHER; note = 5-methyl-2'-deoxycytidine 3'-phosphorothioate
  modified_base 12: mod_base = OTHER; note = 2'-deoxyguanosine 3'-phosphorothioate
  modified_base 13..14: mod_base = OTHER; note = 2'-deoxyadenosine 3'-phosphorothioate
  modified_base 15: mod_base = OTHER; note = 5-methyl-2'-deoxycytidine 3'-phosphorothioate
  modified_base 16: mod_base = OTHER; note = 2'-O-methoxyethyl 5-methylcytidine 3'-phosphorothioate
  modified_base 17..18: mod_base = OTHER; note = 2'-O-methoxyethyl adenosine 3'-phosphorothioate
  modified_base 19: mod_base = OTHER; note = 2'-O-methoxyethyl 5-methylcytidine 3'-phosphorothioate
  modified_base 20: mod_base = OTHER; note = 2'-O-methoxyethyl guanosine
ttgcactttgcgaaccaacg

SEQ ID NO: 1446 - DNA, 20 bp, synthetic construct
  source 1..20: mol_type = other DNA
  modified_base 1: mod_base = OTHER; note = 2'-O-methoxyethyl guanosine 3'-phosphorothioate
  modified_base 2: mod_base = OTHER; note = 2'-O-methoxyethyl thymidine 3'-phosphorothioate
  modified_base 3: mod_base = OTHER; note = 2'-O-methoxyethyl 5-methylcytidine 3'-phosphorothioate
  modified_base 4..5: mod_base = OTHER; note = 2'-O-methoxyethyl guanosine 3'-phosphorothioate
  modified_base 6: mod_base = OTHER; note = 2'-deoxyadenosine 3'-phosphorothioate
  modified_base 7..8: mod_base = OTHER; note = 2'-deoxyguanosine 3'-phosphorothioate
  modified_base 9: mod_base = OTHER; note = 2'-deoxyadenosine 3'-phosphorothioate
  modified_base 10: mod_base = OTHER; note = 5-methyl-2'-deoxycytidine 3'-phosphorothioate
  modified_base 11: mod_base = OTHER; note = 2'-deoxyguanosine 3'-phosphorothioate
  modified_base 12: mod_base = OTHER; note = 2'-deoxyadenosine 3'-phosphorothioate
  modified_base 13..14: mod_base = OTHER; note = 2'-deoxyguanosine 3'-phosphorothioate
  modified_base 15: mod_base = OTHER; note = 2'-deoxythymidine 3'-phosphorothioate
  modified_base 16: mod_base = OTHER; note = 2'-O-methoxyethyl 5-methylcytidine 3'-phosphorothioate
  modified_base 17..18: mod_base = OTHER; note = 2'-O-methoxyethyl adenosine 3'-phosphorothioate
  modified_base 19: mod_base = OTHER; note = 2'-O-methoxyethyl thymidine 3'-phosphorothioate
  modified_base 20: mod_base = OTHER; note = 2'-O-methoxyethyl adenosine
gtcggaggacgaggtcaata
